(19) United States
(12) Patent Application Publication
(10) Pub. No.: US 2022/0186256 A1
(43) Pub. Date: Jun. 16, 2022

(54) RECOMBINANT ADENO-ASSOCIATED VIRUSES AND USES THEREOF

(71) Applicant: REGENXBIO INC., Rockville, MD (US)

(72) Inventors: Olivier Danos, Princeton, NJ (US); Ye Liu, Clarksville, MD (US); Andrew Mercer, Poolesville, MD (US); Samantha Yost, Rockville, MD (US); Subha Karumuthil-Melethil, Germantown, MD (US); Elad Firnberg, Baltimore, MD (US)

(21) Appl. No.: 17/600,418

(22) PCT Filed: Apr. 2, 2020
(86) PCT No.: PCT/US20/26485

§ 371 Date: Sep. 30, 2021

Related U.S. Application Data
(60) Provisional application No. 62/829,608, filed on Apr. 4, 2019.
(60) Provisional application No. 62/833,516, filed on Apr. 12, 2019.
(60) Provisional application No. 62/839,368, filed on Apr. 26, 2019.
(60) Provisional application No. 62/924,107, filed on Oct. 21, 2019.
(60) Provisional application No. 62/963,512, filed on Jan. 20, 2020.

(51) Int. Cl. C12N 15/86; C07K 14/005

(52) U.S. Cl. CPC C12N 15/86; C07K 14/005; C12N 2750/14145; C12N 2750/14143; C12N 2750/14122

(57) ABSTRACT

The present invention relates to recombinant adeno-associated viruses (rAAVs) having capsid proteins engineered to include amino acid sequences that confer and/or enhance desired properties. In particular, the invention provides engineered capsid proteins comprising peptide insertions from heterologous proteins inserted within or near variable region IV (VR-IV) of the virus capsid, such that the insertion is surface exposed on the AAV particle. The invention also provides capsid proteins that direct rAAVs to target tissues, in particular, capsid proteins comprising peptides derived from erythropoietin or dynein that are inserted into surface-exposed variable regions and that target rAAVs to retinal tissue and/or neural tissue, including the central nervous system, and deliver therapeutics for treating neurological and/or eye disorders.

### 0. SEQUENCE LISTING

[0001] The instant application contains a Sequence Listing which has been submitted electronically in ASCII format and is hereby incorporated by reference in its entirety. Said ASCII copy, created on Mar. 29, 2020, is named 38013_0002P1_SL.txt and is 637,866 bytes in size.

### 1. FIELD OF THE INVENTION

[0002] The present invention relates to recombinant adeno-associated viruses (rAAVs) having capsid proteins engineered to include amino acid sequences that confer and/or enhance desired properties. In particular, the invention provides engineered capsid proteins comprising peptide insertions from heterologous proteins inserted within or near variable region IV (VR-IV) or, alternatively, within or near variable region VIII (VR-VIII) of the virus capsid, such that the insertion is surface exposed on the AAV particle. The invention also provides capsid proteins that direct rAAVs to target tissues, in particular, capsid proteins comprising peptides derived from e.g. erythropoietin or dynein inserted into surface-exposed variable regions to target rAAVs to and/or improve transduction of retinal and neural tissue, including the central nervous system, and deliver therapeutics for treating neurological disorders.

### 2. BACKGROUND

[0003] The use of adeno-associated viruses (AAV) as gene delivery vectors is a promising avenue for the treatment of many unmet patient needs. Dozens of naturally occurring AAV capsids have been reported, and mining the natural diversity of AAV sequences in primate tissues has identified over a hundred variants, distributed in clades. AAVs belong to the parvovirus family and are single-stranded DNA viruses with relatively small genomes and simple genetic components. Without a helper virus, AAV establishes a latent infection. An AAV genome generally has a Rep gene and a Cap gene, flanked by inverted terminal repeats (ITRs), which serve as replication and packaging signals for vector production. The capsid proteins form capsids that carry genome DNA and can determine tissue tropism to deliver DNA into target cells.

[0004] Due to low pathogenicity and the promise of long-term, targeted gene expression, recombinant AAVs (rAAVs) have been used as gene transfer vectors, in which therapeutic sequences are packaged into various capsids. Such vectors have been used in preclinical gene therapy studies and over twenty gene therapy products are currently in clinical development. Recombinant AAVs, such as AAV9, have demonstrated desirable neurotropic properties and clinical trials using recombinant AAV9 for treatment of CNS disease are underway. However, attempts to enhance the neurotropic properties of rAAVs in human subjects have met with limited success.

[0005] There remains a need for rAAV vectors with enhanced neurotropic properties for use, e.g., in crossing the blood brain barrier to delivery therapies in treating disorders associated with the central nervous system and the eye, particularly the retina. There also is a need for rAAV vectors with enhanced tissue-specific targeting and/or enhanced tissue-specific transduction to deliver therapies.

### 3. SUMMARY OF THE INVENTION

[0006] Provided are recombinant adeno-associated viruses (rAAVs) having capsid proteins engineered to include amino acid sequences that confer and/or enhance desired properties such as tissue targeting, transduction and/or integration of the rAAV genome. In particular, the invention provides engineered capsid proteins comprising one or more peptide insertions from heterologous proteins inserted within or near variable region IV (VR-IV) of the virus capsid, or within or near variable region VIII (VR-VIII), such that the insertion is surface exposed on the AAV particle. In particular embodiments, the insertion is immediately after an amino acid residue corresponding to one of the amino acids 451 to 461 of the AAV9 capsid protein (SEQ ID NO:118 and as numbered in FIG. 8), including after the amino acid 454 (i.e., between amino acid 454 and 455) of the AAV9 capsid or in a capsid protein of a different AAV type after a residue that corresponds to the amino acid 454 of AAV9 (e.g., SEQ ID NO: 110-117 or 119-121) “corresponding to” meaning aligned with in the sequence alignment in FIG. 8 or for AAV types not included in FIG. 8, a similar amino acid sequence alignment of the AAV9 capsid protein sequence (SEQ ID NO:118) and the AAV capsid protein as would be well known in the art). Thus, the invention provides an engineered capsid protein comprising a peptide insertion from a heterologous protein inserted immediately after or near an amino acid corresponding to the amino acid residue at position 454 of AAV9, as numbered in FIG. 8. In additional particular embodiments, the insertion is immediately after an amino acid residue corresponding to amino acid 588 (i.e., between amino acids 588 and 589) of the AAV9 capsid protein (SEQ ID NO:118 and as numbered in FIG. 8), or in a capsid protein of a different AAV type after a residue that corresponds to the amino acid 588 of AAV9 (e.g., SEQ ID NO: 110-117 or 119-121). The capsid protein may be an AAV9 capsid protein but may also be any AAV capsid protein, such as AAV serotype 1 (SEQ ID NO: 110); AAV serotype 2 (SEQ ID NO: 111); AAV serotype 3 (SEQ ID NO: 112) AAV serotype 4 (SEQ ID NO: 113); AAV serotype 5 (SEQ ID NO: 114); AAV serotype 6 (SEQ ID NO: 115); 451-461 of AAV7 capsid (SEQ ID NO: 116); 451-461 of AAV8 capsid (SEQ ID NO: 117); AAV serotype 9 (SEQ ID NO: 118); AAV serotype 9e (SEQ ID NO: 119); AAV serotype rh10 (SEQ ID NO: 120); AAV serotype rh20 (SEQ ID NO: 121); and AAV serotype hu.37 (SEQ ID NO: 122), AAV serotype rh39 (SEQ ID NO: 124), and AAV serotype rh74 (SEQ ID NO: 123 or SEQ ID NO: 154) (see FIG. 8).

[0007] Also provided are capsid proteins that direct rAAVs to target tissues, in particular, capsid proteins comprising peptides derived from erythropoietin or dynein (including axonemal or cytoplasmic dynein) or a peptide that promotes tissue targeting and/or cellular uptake and/or integration of the rAAV genome, that are inserted into surface-exposed variable regions and that target rAAVs to neural tissue, including to the central nervous system, and to retinal tissue, and deliver therapeutics for treating neurological and ocular disorders. These peptides are advantageously inserted into the amino acid sequence of the capsid protein such that, when the capsid protein is incorporated into the AAV particle, the inserted peptide is surface exposed. These peptides are inserted immediately after one of the amino acids of, or after one of the amino acids corresponding to the amino acid, 262-273; 451-461; or 585-593 of AAV9 capsid (SEQ ID NO:118 and see FIG. 8 for alignment), or immediately after an amino acid residue corresponding to the first codon encoding VP2, that is amino acid 138 of the AAV9 capsid and amino acids corresponding to position 138 of the AAV9 capsid (SEQ ID NO:118 and see FIG. 8 for alignment). In certain embodiments the inserted peptide is at least 4 contiguous amino acids or is 5, 6, 7 contiguous amino acids of one of the peptides KMQVPFQ (SEQ ID NO: 1); TLAAPFK (SEQ ID NO: 2); QQAAPSF (SEQ ID NO: 3); RYNAPFK (SEQ ID NO: 4); LKLPPIV (SEQ ID NO: 5); PFIKPFE (SEQ ID NO: 6); or TLSLPWK (SEQ ID NO: 7) of the axonemal dynein heavy chain or is alternatively 5, 6, 7, 8, 9, 10 or 11 contiguous amino acids of QEQLERALNS S (SEQ ID NO: 8), which is a non-linear epitope of erythropoietin called ARA290.

[0008] Provided are engineered capsid proteins comprising peptides that target specific tissues, including to promote or increase cellular uptake and/or integration of an rAAV genome, wherein the peptides are inserted into surface-exposed variable regions of the capside protein. In certain embodiments, the peptides target and/or promote transduction or genome integration in cells of bone (for example, at least 4 contiguous amino acids or at least 7 or 8 contiguous amino acids of DDDDDDDD (SEQ ID NO: 9)), brain (at least 4 amino acids or at least 7 contiguous amino acids or is 7 contiguous amino acids of LSSRLDA (SEQ ID NO: 10) or is 7, 8 or 9 contiguous amino acids of CLSSRLDAC (SEQ ID NO: 11)), kidney (at least 4 or 5 contiguous amino acids of or is the peptide CLPVASC (SEQ ID NO: 12) or LPVAS (SEQ ID NO: 13)), muscle (at least 4, 5, 6, or 7 contiguous amino acids or is the peptide of ASSLNIA (SEQ ID NO: 14)), retinal cells (at least 4 contiguous amino acids of or is 5, 6, or 7 contiguous amino acids of LGETTRP (SEQ ID NO: 15) or LALGETTRP (SEQ ID NO: 16)), or is derived from the transferrin receptor (at least 4 contiguous amino acids of or at least 7 contiguous amino acids of or is 7 contiguous amino acids of HAIYPRH (SEQ ID NO: 17), THRPPMWSPVWP (SEQ ID NO: 18), RTIGPSV (SEQ ID NO: 19), or CRTIGPSVC (SEQ ID NO: 20)). In certain embodiments, the peptide is CLPVASC (SEQ ID NO: 12) or is ASSLNIA (SEQ ID NO: 14) and capsids containing this peptide, for example, inserted after position 454 of AAV9, preferentially target the rAAV with the capsid to the kidney as compared to the liver. In other embodiments, the inserted peptide is at least 4 contiguous amino acids or at least 7 or 8 contiguous amino acids or is the peptide SITLVKSTQTV (SEQ ID NO: 21) or TILSRSTQTG (SEQ ID NO: 22) or QAVRTSL (SEQ ID NO: 23) or QAVRTSH (SEQ ID NO: 24). In some embodiments, the peptide is no more than 12 contiguous amino acids. In other embodiments, provided are engineered capsids having one or more amino acid substitutions which may improve tropism, transduction or reduce immune neutralizing activity. Such amino acid modifications include A269S of AAV8, and corresponding substitutions in other AAV type capsids, S263F/S269T/A273T of AAV9, and corresponding substitutions in other AAV type capsids, W530R or Q474A of AAV9, and corresponding substitutions in other AAV type capsids. The capsids having these amino acid substitutions may further have substitution of the NNN (asparagines) at 498 to 500 with AAA (alanines) of the AAV8 capsid, or substitutions of the NNN (asparagines) at 496 to 498 with AAA (alanines) of the AAV9 capsid, or corresponding substitutions in other AAV type capsids.

[0009] Also provided are engineered capsid proteins that promote transduction of the rAAV in one or more tissues, including one or more cell types, upon systemic, intravenous, intrathecal, intranasal, intraperitoneal, or intravitreal administration, wherein the capsid proteins comprise a peptide that is inserted into a surface-exposed variable region (VR) of the capsid, e.g. VR-I, VR-IV or VR-VIII, or after the first amino acid of VP2, e.g., immediately after residue 138 of the AAV9 capsid (amino acid sequence of SEQ ID NO:118) or immediately after the corresponding residue of another AAV capsid, or alternatively is engineered with one or more of the amino acid substitutions described herein, and transduction of the AAV having the engineered capsid in the at least one tissue is increased upon said administration compared to the transduction of the AAV having the corresponding unengineered capsid. In certain embodiments, transduction is measured by detection of transgene, such as GFP fluorescence.

[0010] In certain embodiments, provided are rAAVs incorporating the engineered capsids described herein, including rAAVs with genomes comprising a transgene of therapeutic interest. Packaging cells for producing the rAAVs described herein are provided. Method of treatment by delivery of, and pharmaceutical compositions comprising, the engineered rAAVs described herein are also provided. Also provided are methods of manufacturing the rAAVs with the engineered capsids described herein.

[0011] The invention is illustrated by way of examples infra describing the construction of rAAV9 capsids engineered with peptide inserts designed on the basis of the human axonemal dynein heavy chain tail, ARA290, and other tissue targeting or homing peptides and capsids engineered with amino acid substitutions.

### 3.1. Embodiments

[0012] 1. A recombinant adeno-associated virus (rAAV) capsid protein comprising a peptide insertion of at least 4 and up to 20 contiguous amino acids from a heterologous protein that is not a capsid protein, said peptide insertion being immediately after an amino acid residue corresponding to one of amino acids 451 to 461 of AAV9 capsid protein of FIG. 8 (SEQ ID NO:118), wherein said peptide insertion is surface exposed when said capsid protein is packaged as an AAV particle.

[0013] 2. The rAAV capsid protein of embodiment 1, wherein said capsid protein is from at least one AAV serotype of AAV serotype 1 (AAV1), serotype 2 (AAV2), serotype 3 (AAV3), serotype 4 (AAV4), serotype 5 (AAV5), serotype 6 (AAV6), serotype 7 (AAV7), serotype 8 (AAV8), serotype rh8 (AAVrh8), serotype 9 (AAV9), serotype 9e (AAV9e), serotype rh10 (AAVrh10), serotype rh20 (AAVrh20), serotype rh39 (AAVrh39), serotype hu.37 (AAVhu.37) or serotype rh74 (AAVrh74).

[0014] 3. The rAAV capsid protein of embodiment 2, wherein said peptide insertion occurs immediately after one of the amino acid residues within:

[0015] 450-459 of AAV1 capsid amino acid sequence (SEQ ID NO 110);

[0016] 449-458 of AAV2 capsid amino acid sequence (SEQ ID NO. 111);

[0017] 449-459 of AAV3 capsid amino acid sequence (SEQ ID NO, 112);

[0018] 443-453 of AAV4 capsid amino acid sequence (SEQ ID NO. 113);

[0019] 442-445 of AAV5 capsid amino acid sequence (SEQ ID NO. 114);

[0020] 450-459 of AAV6 capsid amino acid sequence (SEQ ID NO. 115);

[0021] 451-461 of AAV7 capsid amino acid sequence (SEQ ID NO. 116);

[0022] 451-461 of AAV8 capsid amino acid sequence (SEQ ID NO. 117);

[0023] 451-461 of AAV9 capsid amino acid sequence (SEQ ID NO. 118);

[0024] 452-461 of AAV9e capsid amino acid sequence (SEQ ID NO. 119);

[0025] 452-461 of AAVrh10 capsid amino acid sequence (SEQ ID NO. 120);

[0026] 452-461 of AAVrh20 capsid amino acid sequence (SEQ ID NO. 121);

[0027] 452-461 of AAVhu.37 capsid amino acid sequence (SEQ ID NO. 122);

[0028] 452-461 of AAVrh74 capsid amino acid sequence (SEQ ID NO 123 or SEQ ID NO: 154); or

[0029] 452-461 of AAVrh39 capsid amino acid sequence (SEQ ID NO. 124) in the sequences depicted in FIG. 8.

[0030] 4. The rAAV capsid protein of embodiment 3, wherein said peptide insertion occurs immediately after one of the amino acid residues I451, N452, G453, S454, G455, Q456, N457, Q458, Q459, T460, or L461 of AAV9 capsid or the immediately after the amino acid residue in an AAV capsid corresponding to amino acid I451, N452, G453, S454, G455, Q456, N457, Q458, Q459, T460, or L461 of AAV9 capsid (SEQ ID NO:118) as aligned and according to the amino acid numbering of FIG. 8.

[0031] 5. The rAAV capsid protein of any preceding embodiment, wherein said heterologous protein is a homing domain, a neutralizing antibody epitope, or a purification tag.

[0032] 6. The rAAV capsid protein of embodiment 5, wherein said homing domain is

[0033] a neural tissue-homing domain;

[0034] an axonemal or cytoplasmic dynein-homing domain;

[0035] a bone-homing domain;

[0036] a kidney-homing domain;

[0037] a muscle-homing domain;

[0038] an endothelial cell-homing domain;

[0039] an integrin receptor-binding domain;

[0040] a transferrin receptor-binding domain;

[0041] a tumor cell-targeting domain; or

[0042] a retinal cell homing domain.

[0043] 7. The rAAV capsid protein of embodiment 6, wherein the peptide insertion comprises or consists of a dynein peptide or dynein-homing peptide of at least 4 or at least 7 contiguous amino acids of amino acid sequence SITLVKSTQTV (SEQ ID NO: 21), TILSRSTQTG (SEQ ID NO: 22), VVMVGEKPITITQHSVETEG (SEQ ID NO: 25), RSSEEDKSTQTT (SEQ ID NO: 26), KMQVPFQ (SEQ ID NO: 1), LKLPPIV (SEQ ID NO: 5), PFIKPFE (SEQ ID NO: 6), TLSLPWK (SEQ ID NO: 7), QQAAPSF (SEQ ID NO: 3), RYNAPFK (SEQ ID NO: 4), TLAVPFK (SEQ ID NO: 27), TLAAPFK (SEQ ID NO: 2), LGETTRP (SEQ ID NO: 15), or LALGETTRP (SEQ ID NO: 16).

[0044] 8. The rAAV capsid protein of embodiment 6, wherein the peptide insertion from said transferrin receptor-binding domain comprises at least 4 or at least 7 contiguous amino acids of amino acid sequence RTIGPSV (SEQ ID NO: 19) or CRTIGPSVC (SEQ ID NO: 20).

[0045] 9. The rAAV capsid protein of embodiment 6, wherein the peptide insertion from said retinal cell-homing domain comprises amino acid sequence LGETTRP (SEQ ID NO: 15) or LALGETTRP (SEQ ID NO: 16).

[0046] 10. The rAAV capsid protein of embodiment 9, wherein the LGETTRP (SEQ ID NO: 15) or LALGETTRP (SEQ ID NO: 16) peptide insertion occurs in the AAV8 capsid protein or in the AAV9 capsid protein.

[0047] 11. The rAAV capsid protein of any of the previous embodiments, wherein the peptide insertion occurs in an AAV9 capsid protein after amino acid S454 of the AAV9 capsid protein (SEQ ID NO:118) or in an AAV capsid protein after a residue corresponding to S454 of the AAV9 capsid protein as aligned and according to the amino acid numbering in FIG. 8.

[0048] 12. The rAAV capsid protein of any of the above embodiments, with the proviso that the capsid protein is not the AAV2 capsid protein.

[0049] 13. A nucleic acid comprising a nucleotide sequence encoding the rAAV capsid protein of any of the above embodiments, or encoding an amino acid sequence sharing at least 80% identity therewith.

[0050] 14. A packaging cell capable of expressing the nucleic acid of embodiment 13 to produce AAV vectors comprising the capsid protein encoded by said nucleotide sequence.

[0051] 15. A rAAV vector comprising the capsid protein of any of embodiments 1-12.

[0052] 16. The rAAV vector of embodiment 15, further comprising a transgene.

[0053] 17. A pharmaceutical composition comprising the rAAV vector of embodiment 15 or 16 and a pharmaceutically acceptable carrier.

[0054] 18. A method of delivering a transgene to a cell, said method comprising contacting said cell with the rAAV vector of embodiment 16, wherein said transgene is delivered to said cell.

[0055] 19. A method of delivering a transgene to a target tissue, or a target cell or cellular matrix thereof, of a subject in need thereof, said method comprising administering to said subject the rAAV vector of embodiment 16, wherein the transgene is delivered to the target tissue of said subject.

[0056] 20. A pharmaceutical composition for use in delivering a transgene to a cell, said composition comprising the rAAV vector of embodiment 16 wherein said cell is contacted with the vector.

[0057] 21. A pharmaceutical composition for use in delivering a transgene to a target tissue of a subject in need thereof, said pharmaceutical composition comprising the rAAV vector of embodiment 16, wherein said peptide insertion is a homing peptide and wherein the vector is administered to said subject.

[0058] 22. The method, or pharmaceutical composition for use, according to embodiments 18 to 21, wherein said rAAV vector is administered systemically, intravenously, intrathecally, intra-nasally, intra-peritoneally, or intravitreally.

[0059] 23. The method, or pharmaceutical composition for use, according to embodiments 18 to 21, wherein said target tissue, or a target cell or cellular matrix thereof, is:
[0060] a neural tissue, and said vector comprises the peptide insertion from said neural tissue-homing domain;
[0061] bone, and said vector comprises the peptide insertion from said bone-homing domain;
[0062] kidney, and said vector comprises the peptide insertion from said kidney-homing domain;
[0063] muscle, and said vector comprises the peptide insertion from said muscle-homing domain;
[0064] an endothelial cell, and said vector comprises the peptide insertion from said endothelial cell-homing domain;
[0065] a cell expressing an integrin receptor, and said vector comprises the peptide insertion from said integrin receptor-binding domain;
[0066] a tumor cell expressing a transferrin receptor, and said vector comprises the peptide insertion from said transferrin receptor-binding domain; and
[0067] a tumor cell, and said vector comprises the peptide insertion from said tumor cell-targeting domain; or
[0068] a retinal cell, and said vector comprises the peptide insertion from said retinal cell-homing domain.

[0069] 24. A recombinant adeno-associated virus (rAAV) capsid protein, said capsid protein comprising a peptide insertion of at least 4 and up to 20 contiguous amino acids from a heterologous protein or domain selected from the group consisting of
[0070] a neural tissue-homing protein or domain, with the proviso that the peptide insertion does not comprise sequence TLAVPFK (SEQ ID NO: 27);
[0071] an axonemal or cytoplasmic dynein-homing domain;
[0072] a bone-homing domain;
[0073] a kidney-homing domain;
[0074] a muscle-homing domain;
[0075] an endothelial cell-homing domain;
[0076] an integrin receptor-binding domain;
[0077] a transferrin receptor-binding domain, with the proviso that the peptide insertion does not comprise sequence RTIGPSV (SEQ ID NO: 19) nor CRTIGPSVC (SEQ ID NO: 20);
[0078] a tumor cell-targeting domain; and
[0079] a retinal cell-homing domain, with the proviso that the peptide insertion does not comprise sequence LGETTRP (SEQ ID NO: 15) nor LALGETTRP (SEQ ID NO: 16).
[0080] wherein said peptide insertion is surface exposed when said capsid protein is packaged as an AAV particle.

[0081] 25. The rAAV capsid protein of embodiment 24, wherein said neural tissue-homing protein or retinal cell-homing domain is a human axonemal dynein (HAD) heavy chain tail.

[0082] 26. The rAAV capsid protein of embodiment 25, wherein said peptide insertion comprises at least 4 and up to 12 contiguous amino acids from a dimerization domain of said HAD heavy chain tail.

[0083] 27. The rAAV capsid protein of embodiment 26, wherein said peptide insertion comprises at least 4 and up to 12 contiguous amino acids from the group consisting of (depicted in FIGS. 7A-7M):

[0084] (aa 1-1542 of DYH1_HUMAN UniProtKB-Q9P2D7) (SEQ ID NO. 97);

[0085] (aa 1-1764 of DYH2_HUMAN UniProtKB-Q9P225) (SEQ ID NO. 98);

[0086] (aa 1-1390 of DYH3_HUMAN UniProtKB-Q8TD57) (SEQ ID NO. 99);

[0087] (aa 1-1941 of DYH5_HUMAN UniProtKB-Q8TE73) (SEQ ID NO. 100);

[0088] (aa 1-1433 of DYH6_HUMAN UniProtKB-Q9C0G6) (SEQ ID NO. 101);

[0089] (aa 1-1289 of DYH7_HUMAN UniProtKB-Q8WXX0) (SEQ ID NO. 102);

[0090] (aa 1-1807 of DYH8_HUMAN UniProtKB-Q96JB1) (SEQ ID NO. 103);

[0091] (aa 1-1831 of DYH9_HUMAN UniProtKB-Q9NYC9) (SEQ ID NO. 104);

[0092] (aa 1-1793 of DYH10_HUMAN UniProtKB-Q8IVF4) (SEQ ID NO. 105);

[0093] (aa 1-1854 of DYH11_HUMAN UniProtKB-Q96DT5) (SEQ ID NO. 106);

[0094] (aa 1-1214 of DYH12_HUMAN UniProtKB-Q6ZR08) (SEQ ID NO. 107);

[0095] (aa 1-200 of DYH14_HUMAN UniProtKB-Q0VDD8) (SEQ ID NO. 108); or

[0096] (aa 1-1794 of DYH17_HUMAN UniProtKB-Q9UFH2) (SEQ ID NO. 109).

[0097] 28. The rAAV capsid protein of embodiment 27, wherein said peptide insertion comprises at least 4 and up to 12 contiguous amino acids from residues 1-200 of any one of the axonemal dynein heavy chain sequences (FIGS. 7A-7M).

[0098] 29. The rAAV capsid protein of embodiment 27, wherein said peptide insertion comprises 7 contiguous amino acids from any one of the dynein heavy chain sequences of FIG. 7A-7M.

[0099] 30. The rAAV capsid protein of embodiment 28, wherein said peptide insertion comprises 7 contiguous amino acids from residues 1-200 of any one of the dynein heavy chain sequences (FIG. 7A-7M)

[0100] 31. The rAAV capsid protein of embodiment 25, wherein said peptide insertion comprises at least 4 contiguous amino acids one of:

(SEQ ID NO: 1)
KMQVPFQ;
(SEQ ID NO: 2)
TLAAPFK;
(SEQ ID NO: 3)
QQAAPSF;
(SEQ ID NO: 4)
RYNAPFK;
(SEQ ID NO: 5)
LKLPPIV;
(SEQ ID NO: 6)
PFIKPFE;
or
(SEQ ID NO: 7)
TLSLPWK.

[0101] 32. The rAAV capsid protein of embodiment 25, wherein said peptide insertion consists of a peptide from one of:

(SEQ ID NO: 1)
KMQVPFQ;
(SEQ ID NO: 2)
TLAAPFK;
(SEQ ID NO: 3)
QQAAPSF;
(SEQ ID NO: 4)
RYNAPFK;
(SEQ ID NO: 5)
LKLPPIV;
(SEQ ID NO: 6)
PFIKPFE;
or
(SEQ ID NO: 7)
TLSLPWK.

[0102] 33. The rAAV capsid protein of embodiment 32, wherein said peptide insertion comprises the amino acid sequence TLAAPFK (SEQ ID NO: 2);

[0103] 34. The rAAV capsid protein of embodiment 24, wherein said neural tissue-homing protein is a mouse axonemal dynein (MAD) heavy chain tail.

[0104] 35. The rAAV capsid protein of embodiment 24, wherein said neural tissue-homing domain is an EPO (erythropoietin) domain that binds innate repair receptor and is not erythropoietic, or a conformational analog of said domain.

[0105] 36. The rAAV capsid protein of embodiment 35, wherein the peptide insertion comprises at least 4 and up to 11 contiguous amino acids from QEQLERALNSS (SEQ ID NO: 8).

[0106] 37. The rAAV capsid protein of embodiment 36, wherein said peptide insertion is the ARA290 sequence QEQLERALNSS (SEQ ID NO: 8).

[0107] 38. The rAAV capsid protein of embodiment 24, wherein said neural tissue-homing protein is a brain-homing domain having an SRL (serine-arginine-lysine) motif

[0108] 39. The rAAV capsid protein of embodiment 38, wherein the peptide insertion from said brain-homing domain comprises at least 7 contiguous amino acids of the amino acid sequence LSSRLDA (SEQ ID NO: 10) or CLSSRLDAC (SEQ ID NO: 11).

[0109] 40. The rAAV capsid protein of embodiment 24, wherein said axonemal or cytoplasmic dynein-homing domain is a dynein light chain-homing domain.

[0110] 41. The rAAV capsid protein of embodiment 40, wherein the peptide insertion from said dynein light chain-homing domain is one of SITLVKSTQTV (SEQ ID NO: 21), TILSRSTQTG (SEQ ID NO: 22), VVMVGEKPITITQHSVETEG (SEQ ID NO: 25), or RSSEEDKSTQTT (SEQ ID NO: 26).

[0111] 42. The rAAV capsid protein of embodiment 24, wherein said bone-homing protein is a hydroxyapatite (HA)-binding domain.

[0112] 43. The rAAV capsid protein of embodiment 42, wherein the peptide insertion from said hydroxyapatite (HA)-binding domain is at least 6 amino acid residues of the sequence DDDDDDDD (SEQ ID NO: 9).

[0113] 44. The rAAV capsid protein of embodiment 24, wherein said kidney-homing domain is amino acid sequence CLPVASC (SEQ ID NO: 12).

[0114] 45. The rAAV capsid protein of embodiment 44, wherein the peptide insertion from said kidney-homing domain is amino acid sequence LPVAS (SEQ ID NO: 13) or CLPVASC (SEQ ID NO: 12).

[0115] 46. The rAAV capsid protein of embodiment 24, wherein the peptide insertion from said muscle-homing domain is amino acid sequence ASSLNIA (SEQ ID NO: 14).

[0116] 47. The rAAV capsid protein of embodiment 24, wherein the peptide insertion is amino acid sequence QAVRTSL (SEQ ID NO: 23) or QAVRTSH (SEQ ID NO: 24).

[0117] 48. The rAAV capsid protein of embodiment 24, wherein the peptide insertion from said endothelial cell-homing domain is the amino acid sequence SIGYPLP (SEQ ID NO: 28).

[0118] 49. The rAAV capsid protein of embodiment 24, wherein the peptide insertion from said integrin-binding domain has amino acid sequence CDCRGDCFC (SEQ ID NO: 29).

[0119] 50. The rAAV capsid protein of embodiment 24, wherein said transferrin receptor-binding domain is a transferrin domain, or a conformation analog thereof, or an iron-mimic.

[0120] 51. The rAAV capsid protein of embodiment 50, wherein the peptide insertion from said transferrin domain comprises at least 4 contiguous amino acids and up to 12 contiguous amino acids from sequence HAIYPRH (SEQ ID NO: 17) or THRPPMWSPVWP (SEQ ID NO: 18).

[0121] 52. The rAAV capsid protein of embodiment 51, wherein the peptide insertion is amino acid sequence HAIYPRH (SEQ ID NO: 17) or THRPPMWSPVWP (SEQ ID NO: 18).

[0122] 53. The rAAV capsid protein of embodiment 24, wherein the peptide insertion from said tumor cell-targeting domain is amino acid sequence NGRAHA (SEQ ID NO: 30).

[0123] 54. The rAAV capsid protein of any of embodiments 24-53, wherein said peptide insertion occurs immediately after one of the amino acid residues (as depicted in FIG. 8):
[0124] 138; 262-272; 450-459; or 585-593 of AAV1 capsid amino acid sequence (SEQ ID NO. 110);
[0125] 138; 262-272; 449-458; or 584-592 of AAV2 capsid; amino acid sequence (SEQ ID NO. 111)
[0126] 138; 262-272; 449-459; or 585-593 of AAV3 capsid amino acid sequence (SEQ ID NO. 112);
[0127] 137; 256-262; 443-453; or 583-591 of AAV4 capsid amino acid sequence (SEQ ID NO. 113);
[0128] 137; 252-262; 442-445; or 574-582 of AAV5 capsid amino acid sequence (SEQ ID NO. 114);
[0129] 138; 262-272; 450-459; 585-593 of AAV6 capsid amino acid sequence (SEQ ID NO. 115);
[0130] 138; 263-273; 451-461; 586-594 of AAV7 capsid amino acid sequence (SEQ ID NO. 116);
[0131] 138; 263-274; 452-461; 587-595 of AAV8 capsid amino acid sequence (SEQ ID NO. 117);
[0132] 138; 262-273; 452-461; 585-593 of AAV9 capsid amino acid sequence (SEQ ID NO. 118);
[0133] 138; 262-273; 452-461; 585-593 of AAV9e capsid amino acid sequence (SEQ ID NO. 119);
[0134] 138; 263-274; 452-461; 587-595 of AAVrh10 capsid amino acid sequence (SEQ ID NO. 120);
[0135] 138; 263-274; 452-461; 587-595 of AAVrh20 capsid amino acid sequence (SEQ ID NO. 121);
[0136] 138; 263-274; 452-461; 587-595 of AAVhu37 capsid amino acid sequence (SEQ ID NO. 122)
[0137] 138; 263-274; 452-461; 587-595 of AAVrh74 capsid amino acid sequence (SEQ ID NO. 123 or SEQ ID NO: 154); or
[0138] 138; 263-274; 452-461; 587-595 of AAVrh39 capsid amino acid sequence (SEQ ID NO. 124).

[0139] 55. A recombinant AAV capsid protein comprising an amino acid sequence TLAAPFK (SEQ ID NO: 2) inserted between amino acid residues 588-589 of the AAV9 capsid (SEQ ID NO:118) or corresponding to between amino acid residues 588 to 589 of the AAV9 capsid as aligned in FIG. 8.

[0140] 56. A recombinant AAV capsid protein comprising an amino acid sequence TLAAPFK (SEQ ID NO: 2) inserted immediately after one of amino acids I451 to L461 or S268 of the AAV9 capsid (SEQ ID NO:118) or corresponding to one of amino acids I451 to L461 or S268 of the AAV9 capsid as aligned in FIG. 8.

[0141] 57. A recombinant AAV capsid protein comprising an amino acid sequence QEQLERALNSS (SEQ ID NO: 8) inserted between amino acid residues 588-589 of the AAV9 capsid (SEQ ID NO:118) or corresponding to between amino acid residues 588 to 589 or the AAV9 capsid as aligned in FIG. 8.

[0142] 58. A recombinant AAV capsid protein comprising an amino acid sequence QEQLERALNSS (SEQ ID NO: 8) inserted immediately after one of amino acids I451 to L461 or S268 of the AAV9 capsid (SEQ ID NO:118) or corresponding to one of amino acids I451 to L461 or S268 of the AAV9 capsid as aligned in FIG. 8.

[0143] 59. The rAAV capsid protein of any of embodiments 24-54, wherein said peptide insertion occurs immediately after an amino acid residue corresponding to one of amino acids 451 to 461, S268 or Q588 of AAV9 capsid protein (SEQ ID NO:118) as aligned in FIG. 8.

[0144] 60 The rAAV capsid protein of embodiment 59, wherein said peptide insertion occurs immediately after one of amino acids 451 to 461 of the AAV9 capsid protein (SEQ ID NO:118).

[0145] 61. The rAAV capsid protein of any of embodiments 24-53, wherein said peptide insertion occurs in the eighth variable region (VR-VIII).

[0146] 62. The rAAV capsid protein of any of embodiments 24-61, with the proviso that said capsid protein is not the AAV2 capsid protein.

[0147] 63. A nucleic acid comprising a nucleotide sequence encoding the rAAV capsid protein of any of embodiments 24-62, or encoding an amino acid sequence sharing at least 80% identity therewith.

[0148] 64. A packaging cell capable of expressing the nucleic acid of embodiment 63 to produce AAV vectors comprising the capsid protein encoded by said nucleotide sequence.

[0149] 65. A rAAV vector comprising the capsid protein of any of embodiments 24-62.

[0150] 66. The rAAV vector of embodiment 65 further comprising a transgene.

[0151] 67. A pharmaceutical composition comprising the rAAV vector of embodiment 65 or 66 and a pharmaceutically acceptable carrier.

[0152] 68. A method of delivering a transgene to a cell, said method comprising contacting said cell with the rAAV vector of embodiment 66, wherein said transgene is delivered to said cell.

[0153] 69. A method of delivering a transgene to a target tissue of a subject in need thereof, said method comprising administering to said subject the rAAV vector of embodiment 66;, wherein the transgener is delivered to said subject.

[0154] 70. A pharmaceutical composition for use in delivering a transgene to a cell, said pharmaceutical composition comprising the rAAV vector of embodiment 66, wherein said transgene is delivered to said cell.

[0155] 71. A pharmaceutical composition for use in delivering a transgene to a target tissue of a subject in need thereof, said pharmaceutical composition comprising the rAAV vector of embodiment 66; wherein transgene is delivered to the target tissue.

[0156] 72. The method, or pharmaceutical composition for use, according to embodiments 68-71, wherein said rAAV vector is administered systemically, intravenously, intrathecally, intra-nasally, intra-peritoneally, or intravitreally.

[0157] 73. The method, or pharmaceutical composition for use, according to embodiments 68-71, wherein said vector is administered via lumbar puncture or via cisterna magna.

[0158] 74. A recombinant adeno-associated virus (rAAV) capsid protein, said capsid protein comprising a peptide insertion of at least 4 contiguous amino acids from one of TLAVPFK (SEQ ID NO: 27), RTIGPSV (SEQ ID NO: 19), CRTIGPSVC (SEQ ID NO: 20), LGETTRP (SEQ ID NO: 15), or LALGETTRP (SEQ ID NO: 16);

[0159] wherein said peptide insertion occurs immediately after an amino acid residue corresponding to amino acids 268, 454 or 588 of AAV9 capsid protein as aligned in FIG. 8.

[0160] 75. The rAAV capsid protein of embodiment 74, with the proviso that said capsid protein is not the AAV2 capsid protein.

[0161] 76. The rAAV capsid protein of embodiment 74, wherein said peptide insertion comprises the amino acid sequence TLAVPFK (SEQ ID NO: 27) between amino acid residues 454 and 455 of the AAV9 capsid protein (SEQ ID NO:118).

[0162] 77. The rAAV capsid protein of embodiment 74, wherein said peptide insertion comprises the amino acid sequence TLAVPFK (SEQ ID NO: 27) immediately after one of amino acid residues 262-273 of the AAV9 capsid protein (SEQ ID NO:118).

[0163] 78. The rAAV capsid protein of embodiment 74, wherein said peptide insertion comprises the amino acid sequence LGETTRP (SEQ ID NO: 15) between amino acid residues 454-455 of the AAV8 capsid protein (SEQ ID NO:117).

[0164] 79. The rAAV capsid protein of embodiment 78, wherein said peptide insertion comprises the amino acid sequence LALGETTRP (SEQ ID NO: 16).

[0165] 80. The rAAV capsid protein of embodiment 74, wherein said peptide insertion comprises the amino acid sequence LGETTRP (SEQ ID NO: 15) inserted between amino acid residues 590-591 of the AAV8 capsid protein (SEQ ID NO:117).

[0166] 81. The rAAV capsid protein of embodiment 80, wherein said peptide insertion comprises the amino acid sequence LALGETTRP (SEQ ID NO: 16).

[0167] 82. The rAAV capsid protein of embodiment 74, wherein said peptide insertion comprises the amino acid sequence LGETTRP (SEQ ID NO: 15) immediately after one of amino acid residues 263-274 of the AAV8 capsid protein (SEQ ID NO:117).

[0168] 83. The rAAV capsid protein of embodiment 82, wherein said peptide insertion comprises the amino acid sequence LALGETTRP (SEQ ID NO: 16).

[0169] 84. A nucleic acid comprising a nucleotide sequence encoding the rAAV capsid protein of any of embodiments 74-83, or encoding an amino acid sequence sharing at least 80% identity therewith.

[0170] 85. A packaging cell capable of expressing the nucleic acid of embodiment 84 to produce AAV vectors comprising the capsid protein encoded by said nucleotide sequence.

[0171] 86. A rAAV vector comprising the capsid protein of any of embodiments 74-83.

[0172] 87. The rAAV vector of embodiment 86 further comprising a transgene.

[0173] 88. A pharmaceutical composition comprising the rAAV vector of embodiment 86 or 87 and a pharmaceutically acceptable carrier.

[0174] 89. A method of delivering a transgene to a cell, said method comprising contacting said cell with the rAAV vector of embodiment 86 or 87, wherein said transgene is delivered to said cell.

[0175] 90. A method of delivering a transgene to a target tissue of a subject in need thereof, said method comprising administering to said subject the rAAV vector of embodiment 86 or 87, wherein the transgene is delivered to said target tissue.

[0176] 91. A pharmaceutical composition for use in delivering a transgene to a cell, said pharmaceutical composition comprising the rAAV vector of embodiment 86 or 87, wherein said transgene is delivered to said cell.

[0177] 92. A pharmaceutical composition for use in delivering a transgene to a target tissue of a subject in need thereof, said pharmaceutical composition comprising the rAAV vector of embodiment 86 or 87, wherein the transgene is delivered to said target tissue.

[0178] 93. The method, or pharmaceutical composition for use, of embodiments 89-92, wherein said target tissue is retinal cells and the peptide insertion comprises the amino acid sequence LGETTRP (SEQ ID NO: 15) or LALGETTRP (SEQ ID NO: 16).

[0179] 94. The method, or pharmaceutical composition for use, according to embodiments 89-93, wherein said rAAV vector is administered systemically, intravenously, intrathecally, intra-nasally, intra-peritoneally, or intravitreally.

[0180] 95. The method, or pharmaceutical composition for use, according to embodiments 89-93, wherein said vector is administered via lumbar puncture or via cisterna magna.

[0181] 96. A recombinant AAV capsid protein comprising one or more amino acid substitutions relative to the wild type or unengineered capsid protein, in which the rAAV capsid protein is an AAV8 capsid protein (SEQ ID NO:117) with an A269S amino acid substitution or is an AAV9 capsid protein (SEQ ID NO:118) with S263G/S269R/A273T substitutions, or W503R or Q474A substitutions, or corresponding substitutions in a capsid protein of another AAV type capsid.

[0182] 97. The recombinant AAV capsid protein of embodiment 96 further comprising 498-NNN/AAA-500 for an AAV8 capsid protein or 496-NNN/AAA-498 for an AAV9 capsid protein (SEQ ID NO:118), or corresponding substitutions in a capsid protein of another AAV type capsid.

[0183] 98. A nucleic acid comprising a nucleotide sequence encoding the rAAV capsid protein of embodiments 96 or 97, or encoding an amino acid sequence sharing at least 80% identity therewith.

[0184] 99. A packaging cell capable of expressing the nucleic acid of embodiment 98 to produce AAV vectors comprising the capsid protein encoded by said nucleotide sequence.

[0185] 100. A rAAV vector comprising the capsid protein of any of embodiments 96 or 97.

[0186] 101. The rAAV vector of embodiment 100 further comprising a transgene.

[0187] 102. A pharmaceutical composition comprising the rAAV vector of embodiment 100 or 101 and a pharmaceutically acceptable carrier.

[0188] 103. A method of delivering a transgene to a cell, said method comprising contacting said cell with the rAAV vector of embodiment 101, wherein said transgene is delivered to said cell.

[0189] 104. A method of delivering a transgene to a target tissue of a subject in need thereof, said method comprising administering to said subject the rAAV vector of embodiment 101, wherein the transgene is delivered to said target tissue.

[0190] 105. A pharmaceutical composition for use in delivering a transgene to a cell, said pharmaceutical composition comprising the rAAV vector of embodiment 101, wherein said transgene is delivered to said cell.

[0191] 106. A pharmaceutical composition for use in delivering a transgene to a target tissue of a subject in need thereof, said pharmaceutical composition comprising the rAAV vector of embodiment 101, wherein the transgene is delivered to said target tissue.

[0192] 107. The method, or pharmaceutical composition for use, according to embodiments 102-106, wherein said rAAV vector is administered systemically, intravenously, intrathecally, intra-nasally, intra-peritoneally, or intravitreally.

[0193] 108. The method, or pharmaceutical composition for use, according to embodiments 102-106, wherein said vector is administered via lumbar puncture or via cisterna magna.

### 4. BRIEF DESCRIPTION OF THE FIGURES

[0194] FIG. 1 depicts sequence comparison of the capsid amino acid sequences including the VR-IV loop of the adeno-associated virus type 9 (AAV9 VR-IV) from residues L447 to R476, (with residues 451-459 bracketed) to corresponding to regions of other AAVs. Figure discloses SEQ ID NOS 87-92, 88, and 93-96, respectively, in order of appearance.

[0195] FIG. 2 depicts a protein model of an AAV capsid structure, showing capsid variable regions VR-IV, VR-V and VR-VIII. The box highlights the loop region of VR-IV which provides surface-exposed amino acids as represented in the model.

[0196] FIG. 3 depicts high packaging efficiency (titer) in terms of genome copies per mL (GC/mL) of wild type AAV9 and eight (8) candidate modified rAAV9 vectors (1090, 1091, 1092, 1093, 1094, 1095, 1096, and 1097), where the candidate vectors each contain a FLAG insert immediately after different sites within AAV9s VR-IV, from residues I451 to Q458, respectively. All vectors were packaged with luciferase transgene in 10 mL culture; error bars represent standard error of the mean.

[0197] FIG. 4 demonstrates surface exposure of 1 VR-IV loop FLAG inserts in each of eight (8) candidate modified rAAV9 vectors (1090, 1091, 1092, 1093, 1094, 1095, 1096, and 1097), confirmed by immunoprecipitation of packaged vectors by binding to anti-FLAG resin.

[0198] FIGS. 5A-5B depict transduction efficiency in Lec2 cells, transduced with capsid vectors carrying the luciferase gene (as a transgene), which were packaged into either wild type AAV9 (9-luc), or into each of eight (8) candidate modified (FLAG peptide inserted) rAAV9 vectors (1090, 1091, 1092, 1093, 1094, 1095, 1096, and 1097); transduction activity is expressed as percent luciferase activity, taking the activity of 9-luc as 100% (FIG. 5A), or as Relative Light Units (RLU) per microgram of protein (FIG. 5B).

[0199] FIGS. 6A-6E. FIG. 6A depicts a bar graph illustrating that insertions immediately after S454 of AAV9 of varying peptide length and composition may affect production efficiencies of AAV particles in a packaging cell. Ten peptides of varying composition and length were inserted after S454 within AAV9 VR-IV. qPCR was performed on harvested supernatant of transfected suspension HEK293 cells five days post-transfection. The results depicted in the bar graph demonstrate that the nature of the insertions affects the ability of AAV particles to be produced and secreted by HEK293 cells, and indicated by overall yields (titer). (Error bars represent standard error of the mean length of peptide, which is noted on the Y-axis in parenthesis.) FIGS. 6B-6E depict fluorescence images of transduced cell cultures of the following cell lines: (6B) Lec2 cell line (6C) HT-22 cell line, (6D) hCMEC/D3 cell line, and (6E) C2C12 cell line. AAV9 wild type and S454 insertion homing peptide capsids containing GFP transgene were used to transduce the noted cell lines. P1 vector was not included in images due to extremely low transduction efficiency, and P8 vector was not included due to low titer. AAV9.S454.FLAG showed low transduction levels in every cell type tested.

[0200] FIGS. 7A-7M depict the amino acid sequences for heavy chain tail domains of human axonemal dyneins 1-12, 14, and 17.

[0201] FIG. 8 depicts alignment of AAVs 1-9e, rh10, rh20, rh39, and rh74 version 1 and version 2 capsid sequences with insertion sites for heterologous peptides after the initiation codon of VP2, and within or near variable region 1 (VR-D, variable region 4 (VR-IV), and variable region 8 (VR-VIII), all highlighted in grey; a particular insertion site within variable region eight (VR-VIII) of each capsid protein is shown by the symbol “#” (after amino acid residue 588 according to the amino acid numbering of AAV9).

[0202] FIG. 9 depicts the amino acid sequence for a recombinant AAV9 vector including a peptide insertion of ARA290 between Q588 and A589 (SEQ ID NO: 153); the ARA290 insert is shown in bold.

[0203] FIG. 10 depicts copies of GFP (green fluorescent protein) transgene in mice brain cells, following administration of the AAV vectors: AAV9; AAV.PHP.eB, also referred to herein as AAV9e (AAV9 with the peptide TLAVPFK (SEQ ID NO: 27) inserted between positions 588 and 589 and modifications A587D/A588G); AAV.hDyn (AAV9 with TLAAPFK (SEQ ID NO: 2) between 588 and 589); AAV.PHP.S (AAV9 with the peptide QAVRTSL (SEQ ID NO: 23) inserted between positions 588 and 589); and AAV.PHP.SH (AAV9 with the peptide QAVRTSH (SEQ ID NO: 24) inserted between positions 588 and 589).

[0204] FIGS. 11A-11C depict the amino acid sequences for a recombinant AAV9 vector including a peptide insertion of TLAAPFK (SEQ ID NO: 2) between Q588 and A589 (FIG. 11A), between 5268 and 5269 of VR-III (FIG. 11B), and between S454 and G455 of VR-IV (FIG. 11C), each with the TLAAPFK (SEQ ID NO: 2) insert shown in bold.

[0205] FIGS. 12A-12C depict the amino acid sequences for a recombinant AAV9 vector including a peptide insertion of KMQVPFQ (SEQ ID NO: 1) between Q588 and A589 (FIG. 12A), between S268 and S269 of VR-III (FIG. 12B), and between S454 and G455 of VR-IV (FIG. 12C), each with the KMQVPFQ (SEQ ID NO: 1) insert shown in bold.

[0206] FIGS. 13A-13C depict the amino acid sequences for a recombinant AAV9 vector including a peptide insertion of QQAAPSF (SEQ ID NO: 3) between Q588 and A589 (FIG. 13A), between S268 and S269 of VR-III (FIG. 13B), and between S454 and G455 of VR-IV (FIG. 13C), each with the QQAAPSF (SEQ ID NO: 3) insert shown in bold.

[0207] FIGS. 14A-14C depict the amino acid sequences for a recombinant AAV9 vector including a peptide insertion of RYNAPFK (SEQ ID NO: 4) between Q588 and A589 (FIG. 14A), between S268 and S269 of VR-III (FIG. 14B), and between S454 and G455 of VR-IV (FIG. 14C), each with the RYNAPFK (SEQ ID NO: 4) insert shown in bold.

[0208] FIGS. 15A-15C depict the amino acid sequences for a recombinant AAV9 vector including a peptide insertion of LKLPPIV (SEQ ID NO: 5) between Q588 and A589 (FIG. 15A), between S268 and S269 of VR-III (FIG. 15B), and between S454 and G455 of VR-IV (FIG. 15C), each with the LKLPPIV (SEQ ID NO: 5) insert shown in bold.

[0209] FIGS. 16A-16C depict the amino acid sequences for a recombinant AAV9 vector including a peptide insertion of PFIKPFE (SEQ ID NO: 6) between Q588 and A589 (FIG. 16A), between S268 and S269 of VR-III (FIG. 16B), and between S454 and G455 of VR-IV (FIG. 16C), each with the PFIKPFE (SEQ ID NO: 6) insert shown in bold.

[0210] FIGS. 17A-17C depict the amino acid sequences for a recombinant AAV9 vector including a peptide insertion of TLSLPWK (SEQ ID NO: 7) between Q588 and A589 (FIG. 17A), between S268 and S269 of VR-III (FIG. 17B), and between S454 and G455 of VR-IV (FIG. 17C), each with the TLSLPWK (SEQ ID NO: 7) insert shown in bold.

[0211] FIGS. 18A-18C depict the amino acid sequences for a recombinant AAV8 vector including a peptide insertion of LGETTRP (SEQ ID NO: 15) between N590 and T591 (FIG. 18A), between A269 and T270 of VR-III (FIG. 18B), and between T453 and T454 of VR-IV (FIG. 18C), each with the LGETTRP (SEQ ID NO: 15) insert shown in bold.

[0212] FIGS. 19A-19C depict the amino acid sequences for a recombinant AAV8 vector including a peptide insertion of LALGETTRP (SEQ ID NO: 16) between N590 and T591 (FIG. 19A), between A269 and T270 of VR-III (FIG. 19B), and between T453 and T454 of VR-IV (FIG. 19C), each with the LALGETTRP (SEQ ID NO: 16) insert shown in bold.

[0213] FIGS. 20A-20B depict an in vitro transwell assay for AAV vectors crossing a blood brain barrier (BBB) cell layer (FIG. 20A), and results showing that AAV.hDyn (indicated by inverted triangles) crosses the BBB cell layer of the assay faster than AAV9 (squares), as well as faster and to a greater extent than AAV2 (circles) (FIG. 20B).

[0214] FIG. 21 depicts results of Next Generation Sequencing (NGS) analysis of brain gDNA from mice to which pools of engineered and native capsids have been intravenously administered, revealing relative abundances in tissues of the mice of the different capsids in the pool. Three different pools were injected into mice. Dotted lines indicate which vectors were pooled together. Parental AAV9 was included in each pool as control (Pool 1: BC01, Pool 2: BC31, Pool 3: BC01). Bar codes for each capsid of the pool are listed in Table 8a-8c.

[0215] FIGS. 22A-22H depict an in vivo transduction profile of AAV.hDyn in female C57B1/6 mice, showing copy number/microgram gDNA in naive mice, or mice injected with either AAV9 or AAV.hDyn in brain (FIG. 22A), liver (FIG. 22B), heart (FIG. 22C), lung (FIG. 22D), kidney (FIG. 22E), skeletal muscle (FIG. 22F), sciatic nerve (FIG. 22G), and ovary (FIG. 22H), where AAV.hDyn shows increased brain bio-distribution compared to AAV9.

[0216] FIGS. 23A-23C depict distribution of GFP from AAV.hDyn throughout the brain, where images of immunohistochemical staining of brain sections from the striatum (FIG. 23A), hippocampus (FIG. 23B), and cortex (FIG. 23C) revealed a comprehensive transduction of the brain by the modified vector.

[0217] FIG. 24 depicts in vivo kidney to liver transduction efficiency ratio of genetically engineered AAV9 vectors containing insertions of homing peptides immediately after amino acid 454. Details on homing peptides used in this study are outlined in Table 8.

[0218] FIG. 25 depicts the amino acid sequences for a recombinant AAV9 vector including a peptide insertion of TLAVPFK (SEQ ID NO: 27) between S454 and G455 of VR-IV with the TLAVPFK (SEQ ID NO: 27) insert shown in bold.

### 5. DETAILED DESCRIPTION

[0219] Provided are recombinant adeno-associated viruses (rAAVs) having capsid proteins engineered to include amino acid sequences that confer and/or enhance desired properties, such as tissue targeting, transduction and integration of the rAAV genome. In particular, provided are engineered capsid proteins comprising peptide insertions of 4 to 20, or 7 contiguous amino acids, and in embodiments no more than 12 contiguous amino acids, from heterologous proteins, within or near variable region IV (VR-IV) of the virus capsid, such that the peptide insertion is surface exposed when the capsid protein is packaged as an AAV particle. Also provided are recombinant capsid proteins, and rAAVs comprising them, that have inserted peptides that target specific tissues and/or promote rAAV cellular uptake, transduction and/or genome integration, for example, from the dimerization domain of the heavy chain tail region of human axonemal dynein and others as described herein (see Tables 1A and 1B).

[0220] Also provided are engineered capsids having one or more amino acid substitutions that promote transduction and/or tissue tropism described herein. Recombinant vectors comprising the capsid proteins also are provided, along with pharmaceutical compositions thereof, nucleic acids encoding the capsid proteins, and methods of making and using the capsid proteins and rAAV vectors having the engineered capsids for targeted delivery, improved transduction and/or treatment of disorders associated with the target tissue. In particular, provided are compositions comprising rAAVs and methods of using capsid proteins comprising peptides derived from erythropoietin or dynein or that as associated with dynein to target rAAVs to retinal and/or neural tissue, including the central nervous system, and facilitate delivery of therapeutic agents for treating neurological disorders and/or disorders of the eye, particularly, the retina. Also provided are compositions comprising rAAVs comprising peptide insertions that target or home on target tissues, such as bone, kidney, muscle, lung, retina, and heart, as well as methods of using same.

### 5.1. Definitions

[0221] The term “AAV” or “adeno-associated virus” refers to a Dependoparvovirus within the Parvoviridae genus of viruses. The AAV can be an AAV derived from a naturally occurring “wild-type” virus, an AAV derived from a rAAV genome packaged into a capsid comprising capsid proteins encoded by a naturally occurring cap gene and/or from a rAAV genome packaged into a capsid comprising capsid proteins encoded by a non-naturally occurring capsid cap gene. An example of the latter includes a rAAV having a capsid protein comprising a peptide insertion into the amino acid sequence of the naturally-occurring capsid.

[0222] The term “rAAV” refers to a “recombinant AAV.” In some embodiments, a recombinant AAV has an AAV genome in which part or all of the rep and cap genes have been replaced with heterologous sequences.

[0223] The term “rep-cap helper plasmid” refers to a plasmid that provides the viral rep and cap gene function and aids the production of AAVs from rAAV genomes lacking functional rep and/or the cap gene sequences.

[0224] The term “cap gene” refers to the nucleic acid sequences that encode capsid proteins that form or help form the capsid coat of the virus. For AAV, the capsid protein may be VP1, VP2, or VP3.

[0225] The term “rep gene” refers to the nucleic acid sequences that encode the non-structural protein needed for replication and production of virus.

[0226] As used herein, the terms “nucleic acids” and “nucleotide sequences” include DNA molecules (e.g., cDNA or genomic DNA), RNA molecules (e.g., mRNA), combinations of DNA and RNA molecules or hybrid DNA/RNA molecules, and analogs of DNA or RNA molecules. Such analogs can be generated using, for example, nucleotide analogs, which include, but are not limited to, inosine or tritylated bases. Such analogs can also comprise DNA or RNA molecules comprising modified backbones that lend beneficial attributes to the molecules such as, for example, nuclease resistance or an increased ability to cross cellular membranes. The nucleic acids or nucleotide sequences can be single-stranded, double-stranded, may contain both single-stranded and double-stranded portions, and may contain triple-stranded portions, but preferably is double-stranded DNA.

[0227] As used herein, the terms “subject”, “host”, and “patient” are used interchangeably. As used herein, a subject is a mammal such as a non-primate (e.g., cows, pigs, horses, cats, dogs, rats etc.) or a primate (e.g., monkey and human), or, in certain embodiments, a human.

[0228] As used herein, the terms “therapeutic agent” refers to any agent which can be used in treating, managing, or ameliorating symptoms associated with a disease or disorder, where the disease or disorder is associated with a function to be provided by a transgene. As used herein, a “therapeutically effective amount” refers to the amount of agent, (e.g., an amount of product expressed by the transgene) that provides at least one therapeutic benefit in the treatment or management of the target disease or disorder, when administered to a subject suffering therefrom. Further, a therapeutically effective amount with respect to an agent of the invention means that amount of agent alone, or when in combination with other therapies, that provides at least one therapeutic benefit in the treatment or management of the disease or disorder.

[0229] As used herein, the term “prophylactic agent” refers to any agent which can be used in the prevention, delay, or slowing down of the progression of a disease or disorder, where the disease or disorder is associated with a function to be provided by a transgene. As used herein, a “prophylactically effective amount” refers to the amount of the prophylactic agent (e.g., an amount of product expressed by the transgene) that provides at least one prophylactic benefit in the prevention or delay of the target disease or disorder, when administered to a subject predisposed thereto. A prophylactically effective amount also may refer to the amount of agent sufficient to prevent or delay the occurrence of the target disease or disorder; or slow the progression of the target disease or disorder; the amount sufficient to delay or minimize the onset of the target disease or disorder; or the amount sufficient to prevent or delay the recurrence or spread thereof. A prophylactically effective amount also may refer to the amount of agent sufficient to prevent or delay the exacerbation of symptoms of a target disease or disorder. Further, a prophylactically effective amount with respect to a prophylactic agent of the invention means that amount of prophylactic agent alone, or when in combination with other agents, that provides at least one prophylactic benefit in the prevention or delay of the disease or disorder.

[0230] A prophylactic agent of the invention can be administered to a subject “pre-disposed” to a target disease or disorder. A subject that is “pre-disposed” to a disease or disorder is one that shows symptoms associated with the development of the disease or disorder, or that has a genetic makeup, environmental exposure, or other risk factor for such a disease or disorder, but where the symptoms are not yet at the level to be diagnosed as the disease or disorder. For example, a patient with a family history of a disease associated with a missing gene (to be provided by a transgene) may qualify as one predisposed thereto. Further, a patient with a dormant tumor that persists after removal of a primary tumor may qualify as one predisposed to recurrence of a tumor.

[0231] The “central nervous system” (“CNS”) as used herein refers to neural tissue reaches by a circulating agent after crossing a blood-brain barrier, and includes, for example, the brain, optic nerves, cranial nerves, and spinal cord. The CNS also includes the cerebrospinal fluid, which fills the central canal of the spinal cord as well as the ventricles of the brain.

### 5.2. Recombinant AAV Capsids and Vectors

[0232] One aspect relates to a capsid protein of a recombinant adeno-associated virus (rAAV), the capsid protein engineered to comprise a peptide insertion from a heterologous protein that is not an AAV protein, where the peptide insertion is surface exposed when packaged as an AAV particle. In some embodiments, the peptide insertion occurs within (i.e., between two amino acids without deleting any capsid amino acids) variable region IV (VR IV) of an AAV9 capsid, or a corresponding region for another type AAV capsid (see alignment in FIG. 8). In some embodiments, the peptide insertion occurs within (i.e., between two amino acids without deleting any capsid amino acids) variable region VIII (VR-VIII) of an AAV9 capsid, or a corresponding region of a capsid for another AAV type (see alignment in FIG. 8). In some embodiments, the peptide insertion is from a heterologous protein or domain (that is not an AAV capsid protein or domain), which directs the rAAV particles to target tissues and/or promote rAAV uptake, transduction and/or genome integration. Also provided are nucleic acids encoding the engineered capsid proteins and variants thereof, packaging cells for expressing the nucleic acids to produce rAAV vectors, rAAV vectors further comprising a transgene, and pharmaceutical compositions of the rAAV vectors, as well as methods of using the rAAV vectors to deliver the transgene to a target cell type or target tissue of a subject in need thereof

[0233] In the various embodiments, the target tissue may be neural tissue, bone, kidney, muscle, the eye/retina, or endothelial tissue, or a particular receptor or tumor, and the peptide insertion is derived from a heterologous protein or domain that specifically recognizes and/or binds that tissue, or for example, one or more specific cell types, such as within the target tissue, or cellular matrix thereof. In particular, peptides derived from erythropoietin or dynein, particularly the heavy chain dimerization domain of axonemal dynein or of cytoplasmic dynein, or that bind to or are associated with cytoplasmic dynein inserted into any surface-exposed variable regions, can target rAAVs to neural tissue, including crossing the blood brain barrier to the CNS and delivering therapeutics for treating neurological disorders.

### 5.2.1 rAAV Vectors with Peptide Insertions

[0234] The present inventors have surprisingly discovered positions amenable to peptide insertions within and near the AAV9 capsid VR-IV loop (see FIG. 2) and corresponding regions on the VR-IV loop of capsids of other AAV types. Though previous studies analyzed potential positions in various AAVs, none identified the AAV9 VR-IV as amenable for this purpose (consider, e.g., Wu et al, 2000, “Mutational Analysis of the Adeno-Associated Virus Type 2 (AAV2) Capsid Gene and Construction of AAV2 Vectors with Altered Tropism,” J of Virology 74(18):8635-8647 ; Lochrie et al, 2006, “Adeno-associated virus (AAV) capsid genes isolated from rat and mouse liver genomic DNA define two new AAV species distantly related to AAV-5,” Virology 353:68-82; Shi and Bartlett, 2003, “RGD Inclusion in VP3 Provides Adeno-Associated Virus Type 2 (AAV2)-Based Vectors with a Heparan Sulfate-Independent Cell Entry Mechanism,” Molecular Therapy 7(4):515525-; Nicklin et al., 2001, “Efficient and Selective AAV2-Mediated Gene Transfer Directed to Human Vascular Endothelial Cells” Molecular Therapy 4(2):174-181; Grifman et al., 2001, “Incorporation of Tumor-Targeting Peptides into Recombinant Adeno-associated Virus Capsids,” Molecular Therapy 3(6):964-975; Girod et al. 1999, “Genetic capsid modifications allow efficient re-targeting of adeno-associated virus type 2,” Nature Medicine 3(9):1052-1056; Douar et al., 2003, “Deleterious effect of peptide insertions in a permissive site of the AAV2 capsid, “Virology 309:203-208; and Ponnazhagan, et al. 2001, J. of Virology 75(19):9493-9501).

[0235] Accordingly, provided are rAAV vectors carrying peptide insertions at novel insertion points, in particular, within surface-exposed variable regions in the capsid coat, particularly within or near the variable region IV of the capsid protein. In some embodiments, the rAAV capsid protein comprises a peptide insertion immediately after (i.e., connected by a peptide bond C-terminal to) an amino acid residue corresponding to one of amino acids 451 to 461 of AAV9 capsid protein (amino acid sequence SEQ ID NO:118 and see FIG. 8 for alignment of capsid protein amino acid sequence of other AAV serotypes with amino acid sequence of the AAV9 capsid), where said peptide insertion is surface exposed when the capsid protein is packaged as an AAV particle. The peptide insertion should not delete any residues of the AAV capsid protein. Generally, the peptide insertion occurs in a variable (poorly conserved) region of the capsid protein, compared with other serotypes, and in a surface exposed loop.

[0236] A peptide insertion described as inserted “at” a given site refers to insertion immediately after, that is having a peptide bond to the carboxy group of, the residue normally found at that site in the wild type virus. For example, insertion at Q588 in AAV9 means that the peptide insertion appears between Q588 and the consecutive amino acid (A589) in the AAV9 wildtype capsid protein sequence (SEQ ID NO:118). In embodiments, there is no deletion of amino acid residues at or near (within 5, 10, 15 residues or within the structural loop that is the site of the insertion) the point of insertion.

[0237] In particular embodiments, the capsid protein is an AAV9 capsid protein and the insertion occurs immediately after at least one of the amino acid residues 451 to 461. In particular embodiments, the peptide insertion occurs immediately after amino acid I451, N452, G453, S454, G455, Q456, N457, Q458, Q459, T460, or L461 of the AAV9 capsid (amino acid sequence SEQ ID NO: 118). In certain embodiments, the peptide is inserted between residues S454 and G455 of AAV9 capsid protein or between the residues corresponding to S454 and G455 of an AAV capsid protein other than an AAV9 capsid protein (amino acid sequence SEQ ID NO: 118).

[0238] In other embodiments, provided are engineered capsid proteins comprising targeting peptides heterologous to the capsid protein that are inserted into the AAV capsid protein such that, when incorporated into the AAV vector the heterologous peptide is surface exposed. Such peptides are preferably from human axonemal dynein (HAD) heavy chain tail or are those listed in Tables 1A and 1B below or other targeting peptides for specific tissue types.

[0239] In other embodiments, the capsid protein is from at least one AAV type selected from AAV serotype 1 (AAV1), serotype 2 (AAV2), serotype 3 (AAV3), serotype 4 (AAV4), serotype 5 (AAV5), serotype 6 (AAV6), serotype 7 (AAV7), serotype 8 (AAV8), serotype rh8 (AAVrh8), serotype 9e (AAV9e), serotype rh10 (AAVrh10), serotype rh20 (AAVrh20), serotype rh39 (AAVrh39), serotype hu.37 (AAVhu.37), and serotype rh74 (AAVrh74, versions 1 and 2) (see FIG. 8), and the insertion occurs immediately after an amino acid residue corresponding to at least one of the amino acid residues 451 to 461. The alignments of these different AAV serotypes, as shown in FIG. 8, indicates “corresponding” amino acid residues in the different capsid amino acid sequences such that a “corresponding” amino acid residue is lined up at the same position in the alignment as the residue in the reference sequence. In some particular embodiments, the peptide insertion occurs immediately after one of the amino acid residues within: 450-459 of AAV1 capsid (SEQ ID NO: 110); 449-458 of AAV2 capsid (SEQ ID NO: 111); 449-459 of AAV3 capsid (SEQ ID NO: 112); 443-453 of AAV4 capsid (SEQ ID NO: 113); 442-445 of AAV5 capsid (SEQ ID NO: 114); 450-459 of AAV6 capsid (SEQ ID NO: 115); 451-461 of AAV7 capsid (SEQ ID NO: 116); 451-461 of AAV8 capsid (SEQ ID NO: 117); 451-461 of AAV9 capsid (SEQ ID NO: 118); 452-461 of AAV9e capsid (SEQ ID NO: 119); 452-461 of AAVrh10 capsid (SEQ ID NO: 120); 452-461 of AAVrh20 capsid (SEQ ID NO: 121); 452-461 of AAVhu.37 (SEQ ID NO: 122); 452-461 of AAVrh74 (SEQ ID NO: 123 or SEQ ID NO: 154); or 452-461 of AAVrh39 (SEQ ID NO: 124), in the sequences depicted in FIG. 8. In certain embodiments, the rAAV capsid protein comprises a peptide insertion immediately after (i.e., C-terminal to) amino acid 588 of AAV9 capsid protein (having the amino acid sequence of SEQ ID NO:118 and see FIG. 8), where said peptide insertion is surface exposed when the capsid protein is packaged as an AAV particle. In other embodiments, the rAAV capsid protein has a peptide insertion that is not immediately after amino acid 588 of AAV9 or corresponding to amino acid 588 of AAV9.

[0240] In other embodiments, when the peptide is a targeting peptide, including, at least 4 contiguous amino acids, or at least 7 contiguous amino acids, or is exactly 7 contiguous amino acids, but, in embodiments, no more than 12 contiguous amino acids, or functional fragments thereof, of Tables 1A and 1B, the capsid protein is from at least one AAV type selected from AAV serotype 1 (AAV1), serotype 2 (AAV2), serotype 3 (AAV3), serotype 4 (AAV4), serotype 5 (AAV5), serotype 6 (AAV6), serotype 7 (AAV7), serotype 8 (AAV8), serotype rh8 (AAVrh8), serotype 9e (AAV9e), serotype rh10 (AAVrh10), serotype rh20 (AAVrh20), serotype rh39 (AAVrh39), serotype hu.37 (AAVhu.37), and serotype rh74 (AAVrh74, versions 1 and 2) (see FIG. 8), and the peptide is inserted in the capsid protein at any point such that the peptide is surface exposed when incorporated into the AAV vector. In specific embodiments, the peptide is inserted after 138; 262-272; 450-459; or 585-593 of AAV1 capsid (SEQ ID NO: 110); 138; 262-272; 449-458; or 584-592 of AAV2 capsid (SEQ ID NO: 111); 138; 262-272; 449-459; or 585-593 of AAV3 capsid (SEQ ID NO: 112); 137; 256-262; 443-453; or 583-591 of AAV4 capsid (SEQ ID NO: 113); 137; 252-262; 442-445; or 574-582 of AAV5 capsid (SEQ ID NO: 114); 138; 262-272; 450-459; 585-593 of AAV6 capsid (SEQ ID NO: 115); 138; 263-273; 451-461; 586-594 of AAV7 capsid (SEQ ID NO: 116); 138; 263-274; 452-461; 587-595 of AAV8 capsid (SEQ ID NO: 117); 138; 262-273; 452-461; 585-593 of AAV9 capsid (SEQ ID NO: 118); 138; 262-273; 452-461; 585-593 of AAV9e capsid (SEQ ID NO: 119); 138; 263-274; 452-461; 587-595 of AAVrh10 capsid (SEQ ID NO: 120); 138; 263-274; 452-461; 587-595 of AAVrh20 capsid (SEQ ID NO: 121); 138; 263-274; 452-461; 587-595 of AAVrh74 capsid (SEQ ID NO: 123 or SEQ ID NO: 154), 138; 263-274; 452-461; 587-595 of AAVhu37 capsid (SEQ ID NO: 122); or 138; 263-274; 452-461; 587-595 of AAVrh39 capsid (SEQ ID NO: 124) (as numbered in FIG. 8).

[0241] In some embodiments, the capsid protein is from an AAV other than serotype AAV2. In some embodiments, the peptide insertion does not occur immediately after an amino acid residue corresponding to amino acid 570 or 611 of AAV2 capsid protein. In some embodiments, the peptide insertion does not occur between amino acid residues corresponding to amino acids 587-588 of AAV2 capsid protein (see US 2014/0294771 to Schaffer et al). In some embodiments, the insertion of the bonel peptide with amino acid sequence DDDDDDDD (SEQ ID NO: 9) does not occur directly after amino acid 138 of AAV2 capsid protein (see Alméciga-Diaz et al., 2018, Pediatr. Res.84:545).

[0242] Also provided are AAV vectors comprising the engineered capsids. In some embodiments, the AAV vectors are non-replicating and do not include the nucleotide sequences encoding the rep or cap proteins (these are supplied by the packaging cells in the manufacture of the rAAV vectors). In some embodiments, AAV-based vectors comprise components from one or more serotypes of AAV. In some embodiments, AAV based vectors provided herein comprise capsid components from one or more of AAV1, AAV2, AAV3, AAV4, AAV5, AAV6, AAV7, AAV8, AAV9, AAV10, AAV11, AAV12, AAV13, AAV14, AAV15, AAV16, AAV.rh8, AAV.rh10, AAV.rh20, AAV.rh39, AAV.Rh74, AAV.RHM4-1, AAV.hu37, AAV.Anc80, AAV.Anc80L65, AAV.7m8, AAV.PHP.B, AAV.PHP.eB, AAV2.5, AAV2tYF, AAV3B, AAV.LK03, AAV.HSC1, AAV.HSC2, AAV.HSC3, AAV.HSC4, AAV.HSCS, AAV.HSC6, AAV.HSC7, AAV.HSC8, AAV.HSC9, AAV.HSC10, AAV.HSC11, AAV.HSC12, AAV.HSC13, AAV.HSC14, AAV.HSC15, or AAV.HSC16 or other rAAV particles, or combinations of two or more thereof. In some embodiments, AAV based vectors provided herein comprise components from one or more of AAV1, AAV2, AAV3, AAV4, AAV5, AAV6, AAV7, AAV8, AAV9, AAV10, AAV11, AAV12, AAV13, AAV14, AAV15, AAV16, AAV.rh8, AAV.rh10, AAV.rh20, AAV.rh39, AAV.Rh74, AAV.RHM4-1, AAV.hu37, AAV.Anc80, AAV.Anc80L65, AAV.7m8, AAV.PHP.B, AAV.PHP.eB, AAV2.5, AAV2tYF, AAV3B, AAV.LK03, AAV.HSC1, AAV.HSC2, AAV.HSC3, AAV.HSC4, AAV.HSC5, AAV.HSC6, AAV.HSC7, AAV.HSC8, AAV.HSC9, AAV.HSC10, AAV.HSC11, AAV.HSC12, AAV.HSC13, AAV.HSC14, AAV.HSC15, or AAV.HSC16 or other rAAV particles, or combinations of two or more thereofserotypes. In some embodiments, rAAV particles comprise a capsid protein at least 80% or more identical, e.g., 85%, 85%, 87%, 88%, 89%, 90%, 91%, 92%, 93%, 94%, 95%, 96%, 97%, 98%, 99%, 99.5%, etc., i.e. up to 100% identical, to e.g., VP1, VP2 and/or VP3 sequence of an AAV capsid serotype selected from AAV1, AAV2, AAV3, AAV4, AAV5, AAV6, AAV7, AAV8, AAV9, AAV10, AAV11, AAV12, AAV13, AAV14, AAV15, AAV16, AAV.rh8, AAV.rh10, AAV.rh20, AAV.rh39, AAV.Rh74, AAV.RHM4-1, AAV.hu37, AAV.Anc80, rAAV.Anc80L65, AAV.7m8, AAV.PHP.B, AAV.PHP.eB, AAV2.5, AAV2tYF, AAV3B, AAV.LK03, AAV.HSC1, AAV.HSC2, AAV.HSC3, AAV.HSC4, AAV.HSC5, AAV.HSC6, AAV.HSC7, AAV.HSC8, AAV.HSC9, AAV.HSC10, AAV.HSC11, AAV.HSC12, AAV.HSC13, AAV.HSC14, AAV.HSC15, or AAV.HSC16, or a derivative, modification, or pseudotype thereof. These engineered AAV vectors may comprise a genome comprising a transgene encoding a therapeutic protein.

[0243] In particular embodiments, the recombinant AAV for use in compositions and methods herein is Anc80 or Anc80L65 (see, e.g., Zinn et al., 2015, Cell Rep. 12(6): 1056-1068, which is incorporated by reference in its entirety). In particular embodiments, the recombinant AAV for use in compositions and methods herein is AAV.7m8 (including variants thereof) (see, e.g., U.S. Pat. Nos. 9,193,956; 9,458,517; 9,587,282; US 2016/0376323, and WO 2018/075798, each of which is incorporated herein by reference in its entirety). In particular embodiments, the AAV for use in compositions and methods herein is any AAV disclosed in U.S. Pat. No. 9,585,971, such as AAV-PHP.B. In particular embodiments, the AAV for use in compositions and methods herein is an AAV2/Rec2 or AAV2/Rec3 vector, which has hybrid capsid sequences derived from AAV8 and serotypes cy5, rh20 or rh39 (see, e.g., Issa et al., 2013, PLoS One 8(4): e60361, which is incorporated by reference herein for these vectors). In particular embodiments, the AAV for use in compositions and methods herein is an AAV disclosed in any of the following, each of which is incorporated herein by reference in its entirety: U.S. Pat. Nos. 7,282,199; 7,906,111; 8,524,446; 8,999,678; 8,628,966; 8,927,514; 8,734,809; 9,284,357; 9,409,953; 9,169,299; 9,193,956; 9,458,517; 9,587,282; US 2015/0374803; US 2015/0126588; US 2017/0067908; US 2013/0224836; US 2016/0215024; US 2017/0051257; PCT/US2015/034799; and PCT/EP2015/053335. In some embodiments, rAAV particles have a capsid protein at least 80% or more identical, e.g., 85%, 85%, 87%, 88%, 89%, 90%, 91%, 92%, 93%, 94%, 95%, 96%, 97%, 98%, 99%, 99.5%, etc., i.e. up to 100% identical, to the VP1, VP2 and/or VP3 sequence of an AAV capsid disclosed in any of the following patents and patent applications, each of which is incorporated herein by reference in its entirety: U.S. Pat. Nos. 7,282,199; 7,906,111; 8,524,446; 8,999,678; 8,628,966; 8,927,514; 8,734,809; 9,284,357; 9,409,953; 9,169,299; 9,193,956; 9,458,517; and 9,587,282; US patent application publication nos. 2015/0374803; 2015/0126588; 2017/0067908; 2013/0224836; 2016/0215024; 2017/0051257; and International Patent Application Nos. PCT/US2015/034799; PCT/EP2015/053335.

[0244] In some embodiments, rAAV particles comprise any AAV capsid disclosed in U.S. Pat. No. 9,840,719 and WO 2015/013313, such as AAV.Rh74 and RHM4-1, each of which is incorporated herein by reference in its entirety. In some embodiments, rAAV particles comprise any AAV capsid disclosed in WO 2014/172669, such as AAV rh.74, which is incorporated herein by reference in its entirety. In some embodiments, rAAV particles comprise the capsid of AAV2/5, as described in Georgiadis et al., 2016, Gene Therapy 23: 857-862 and Georgiadis et al., 2018, Gene Therapy 25: 450, each of which is incorporated by reference in its entirety. In some embodiments, rAAV particles comprise any AAV capsid disclosed in WO 2017/070491, such as AAV2tYF, which is incorporated herein by reference in its entirety. In some embodiments, rAAV particles comprise the capsids of AAVLK03 or AAV3B, as described in Puzzo et al., 2017, Sci. Transl. Med. 29(9): 418, which is incorporated by reference in its entirety. In some embodiments, rAAV particles comprise any AAV capsid disclosed in U.S. Pat Nos. 8,628,966; 8,927,514; 9,923,120 and WO 2016/049230, such as HSC1, HSC2, HSC3, HSC4, HSCS, HSC6, HSC7, HSC8, HSC9, HSC10, HSC11, HSC12, HSC13, HSC14, HSC15, or HSC16, each of which is incorporated by reference in its entirety.

[0245] In some embodiments, rAAV particles have a capsid protein disclosed in Intl. Appl. Publ. No. WO 2003/052051 (see, e.g., SEQ ID NO: 2 of '051 publication), WO 2005/033321 (see, e.g., SEQ ID NOs: 123 and 88 of '321 publication), WO 03/042397 (see, e.g., SEQ ID NOs: 2, 81, 85, and 97 of '397 publication), WO 2006/068888 (see, e.g., SEQ ID NOs: 1 and 3-6 of '888 publication), WO 2006/110689, (see, e.g., SEQ ID NOs: 5-38 of '689 publication) WO2009/104964 (see, e.g., SEQ ID NOs: 1-5, 7, 9, 20, 22, 24 and 31 of '964 publication), WO 2010/127097 (see, e.g., SEQ ID NOs: 5-38 of '097 publication), and WO 2015/191508 (see, e.g., SEQ ID NOs: 80-294 of '508 publication), and U.S. Appl. Publ. No. 20150023924 (see, e.g., SEQ ID NOs: 1, 5-10 of '924 publication), the contents of each of which is herein incorporated by reference in its entirety. In some embodiments, rAAV particles have a capsid protein at least 80% or more identical, e.g., 85%, 85%, 87%, 88%, 89%, 90%, 91%, 92%, 93%, 94%, 95%, 96%, 97%, 98%, 99%, 99.5%, etc., i.e. up to 100% identical, to the VP1, VP2 and/or VP3 sequence of an AAV capsid disclosed in Intl. Appl. Publ. No. WO 2003/052051 (see, e.g., SEQ ID NO: 2 of '051 publication), WO 2005/033321 (see, e.g., SEQ ID NOs: 123 and 88 of '321 publication), WO 03/042397 (see, e.g., SEQ ID NOs: 2, 81, 85, and 97 of '397 publication), WO 2006/068888 (see, e.g., SEQ ID NOs: 1 and 3-6 of '888 publication), WO 2006/110689 (see, e.g., SEQ ID NOs: 5-38 of '689 publication) WO2009/104964 (see, e.g., SEQ ID NOs: 1-5, 7, 9, 20, 22, 24 and 31 of 964 publication), WO 2010/127097 (see, e.g., SEQ ID NOs: 5-38 of '097 publication), and WO 2015/191508 (see, e.g., SEQ ID NOs: 80-294 of '508 publication), and U.S. Appl. Publ. No. 20150023924 (see, e.g., SEQ ID NOs: 1, 5-10 of '924 publication).

[0246] In additional embodiments, rAAV particles comprise a pseudotyped AAV capsid. In some embodiments, the pseudotyped AAV capsids are rAAV2/8 or rAAV2/9 pseudotyped AAV capsids. Methods for producing and using pseudotyped rAAV particles are known in the art (see, e.g., Duan et al., J. Virol., 75:7662-7671 (2001); Halbert et al., J. Virol., 74:1524-1532 (2000); Zolotukhin et al., Methods 28:158-167 (2002); and Auricchio et al., Hum. Molec. Genet. 10:3075-3081, (2001).

[0247] In certain embodiments, a single-stranded AAV (ssAAV) may be used. In certain embodiments, a self-complementary vector, e.g., scAAV, may be used (see, e.g., Wu, 2007, Human Gene Therapy, 18(2):171-82; McCarty et al, 2001, Gene Therapy, 8(16):1248-1254; U.S. Pat. Nos. 6,596,535; 7,125,717; and 7,456,683, each of which is incorporated herein by reference in its entirety).

[0248] Generally, the peptide insertion is sequence of contiguous amino acids from a heterologous protein or domain thereof. The peptide to be inserted typically is long enough to retain a particular biological function, characteristic, or feature of the protein or domain from which it is derived. The peptide to be inserted typically is short enough to allow the capsid protein to form a coat, similarly or substantially similarly to the native capsid protein without the insertion. In preferred embodiments, the peptide insertion is from about 4 to about 30 amino acid residues in length, about 4 to about 20, about 4 to about 15, about 5 to about 10, or about 7 amino acids in length. The peptide sequences for insertion are at least 4 amino acids in length and may be 5, 6, 7, 8, 9, 10, 11, 12, 13, 14, or 15 amino acids in length. In some embodiments, the peptide sequences are 16, 17, 18, 19, or 20 amino acids in length. In embodiments, the peptide is no more than 7 amino acids, 10 amino acids or 12 amino acids in length.

[0249] A “peptide insertion from a heterologous protein” in an AAV capsid protein refers to an amino acid sequence that has been introduced into the capsid protein and that is not native to any AAV serotype capsid. Non-limiting examples include a peptide of a human protein in an AAV capsid protein.

[0250] In some embodiments, the peptide insertion is from a homing protein or a homing domain thereof or targeting protein or targeting domain thereof. A “homing domain” or “homing protein” is a domain or protein that preferentially or selectively targets a particular cell type, including cell matrix of a particular cell type—tissue type, organ, tumor type, or the like, over other cells, tissues, organs, or tumors. In the context of the present invention, a peptide from a homing protein or domain gives a peptide for being inserted into a capsid protein, to form part of a capsid coat, or AAV vector, which can then direct the capsid, coat, or vector to target the particular cell type, tissue type, organ, tumor type, or the like or to promote uptake and/or integration of the AAV genome. Non-limiting examples of homing proteins or domains include neural tissue-homing domains, axonemal or cytoplasmic dynein-homing domains, bone-homing domains, kidney-homing domains, muscle-homing domains, endothelial cell-homing domains, retinal cell-homing domains, domains that target particular cellular receptors, such as integrin receptor-binding domains and transferrin receptor-binding domains, tumor cell-targeting domains, targeting peptides from other viruses and the like. As used herein, the terms “homing” and “targeting” are used interchangeably. These peptides may also or alternatively promote rAAV cell uptake, transduction and/or genome integration in cells of the target tissue.

[0251] Examples of peptides for use as peptide insertions as any of the AAV capsid sites described herein are presented in Tables 1A-1B below and include at least 4 amino acid contiguous portions thereof, or 7 amino acid contiguous portions thereof and in some embodiments no more than 12 contiguous amino acids that have the functional attribute of the peptide. See also, e.g., Laakkonen and Vuorinen, 2010, “Homing peptides as targeted delivery vehicles,” Integrative Biology, 2:326-337 (review article). In certain embodiments, the recombinant AAV capsids and AAV vectors are engineered to include a peptide, or at least 4, 5, 6, or 7 amino acid contiguous portion thereof, from any of Tables 1A and 1B below, inserted into the AAV capsid sequence in such a way that the peptide insertion is displayed. In other embodiments, the peptides are inserted after an amino acid residue at positions 138, 262-273, 451-461, or 585-593 of the amino acid sequence of the AAV9 capsid (SEQ ID NO: 118) or a position corresponding thereto in any other AAV serotype (see FIG. 8 for capsid sequence alignments).

TABLE 1A
Homing Peptides

| Peptide | SEQ | | | | |
|---|---|---|---|---|---|
| Sequence | ID | | Target | | |
| (# of aa) | NO: | Name | Tissue | Target cell | Receptor |
| CLSSRLDAC (9) | 11 | SRL | Brain | NR | NR |
| CLPVASC (7) | 12 | | Kidney | NR | NR |
| CGFERVRQCPERC | 31 | GFE-1 | Lung | Alveolar | Membrane |
| (13) | | | | capillaries | dipeptidase |
| CGFELETC (8) | 32 | GFE-2 | | | (MDP) |
| CVALCREACGEGC | 33 | | Skin | Hypodermal blood | NR |
| (13) | | | | vasculature | |
| SWCEPGWCR (9) | 34 | | Pancreas, | Capillaries and | NR |
| | | | homes | larger vessels of | |
| | | | also to | uterus, exocrine | |
| | | | uterus | pancreas and islets | |
| YSGKWGW (7) | 35 | | Intestine | NR | NR |
| GSLGGRS (7) | 36 | | Uterus | NR | NR |
| LMLPRAD (7) | 37 | | Adrenal | NR | NR |
| | | | gland | | |
| CKCCRAKDC (9) | 38 | | White fat | Blood vasculature | Prohibitin |
| ASSLNIA (7) | 14 | | Muscle | Muscle fibers | NR |
| SMSIARL (7) | 39 | SMS | Prostate | NR | NR |
| CRPPR (5) | 40 | | Heart | Blood vasculature | CRIP2; HLP; |
| | | | | | ESP-1 |
| CKRAVR (5) | 41 | | Heart | Blood vasculature | Sigirr; TIRS |
| CPKTRRVPC (9) | 42 | | Heart | Blood vasculature | bc10 |
| CRSTRANPC (9) | 43 | | Heart | Blood vasculature | MpcII-3 |
| CARPAR (6) | 44 | | Heart | Blood vasculature | EST |
| CPGPEGAGC (9) | 45 | | Breast | Blood vasculature | Aminopeptidase |
| | | | | | P |

TABLE 1B

| | SEQ ID | | |
|---|---|---|---|
| Peptide Sequence | NO: | Name | Target |
| DDDDDDDD | 9 | Bone1 | Bone |
| LSSRLDA | 10 | Brain1 | Brain |
| CLSSRLDAC | 11 | Brain2 | Brain |
| SITLVKSTQTV | 21 | DLC-AS1 | Dynein light chain |
| TILSRSTQTG | 22 | DLC-AS2 | Dynein light chain |
| VVMVGEKPITITQHSVETEG | 25 | DLC-AS3 | Dynein light chain |
| RSSEEDKSTQTT | 26 | DLC-AS4 | Dynein light chain |
| KSTEDKSTQTP | 46 | | Dynein light chain |
| LGHFTRSTQTS | 47 | | Dynein light chain |
| GVQMAKSTQTF | 48 | | Dynein light chain |
| PKTRNSQTQTD | 49 | | Dynein light chain |
| VTTQNTASQTM | 50 | | Dynein light chain |
| KSSQDKSTQTTGD | 51 | | Dynein light chain |
| KMQVPFQ | 1 | DYH1 | Dynein peptide; neuronal, |
| | | | brain, and retinal cells |
| TLAAPFK | 2 | hDyn or | Dynein peptide; neuronal, |
| | | DYH3 | brain, and retinal cells |
| LKLPPIV | 5 | DYH12.1 | Dynein peptide; neuronal, |
| | | | brain, and retinal cells |
| PFIKPFE | 6 | DYH12.2 | Dynein peptide; neuronal, |
| | | | brain, and retinal cells |
| TLSLPWK | 7 | DYH17 | Dynein peptide; neuronal, |
| | | | brain, and retinal cells |
| QQAAPSF | 3 | DYH7 | Dynein peptide; neuronal, |
| | | | brain, and retinal cells |
| RYNAPFK | 4 | DYH8 | Dynein peptide; neuronal, |
| | | | brain, and retinal cells |
| QEQLERALNSS | 8 | EPO-HBSP | ARA290 |
| DYKDDDDK | 52 | FLAG | None (FLAG) |
| LPVAS | 13 | Kidney1 | Kidney |
| CLPVASC | 12 | Kidney2 | Kidney |
| ASSLNIA | 14 | Muscle1 | Muscle |
| TLAVPFK | 27 | PHP.B | Ly-6a binding domain |
| QAVRTSL | 23 | PHP.S | |
| QAVRTSH | 24 | PHP.SH | |
| HAIYPRH | 17 | TfR1 | Transferrin Receptor |
| THRPPMWSPVWP | 18 | TfR2 | Transferrin Receptor |
| RTIGPSV | 19 | TfR3 | Transferrin Receptor |
| CRTIGPSVC | 20 | TfR4 | Transferrin Receptor |
| LGETTRP | 15 | Retinal Cell1 | Retinal cells |
| LALGETTRP | 16 | Retinal Ce112 | Retinal cells |

[0252] In another aspect, provided are heterologous peptide insertion libraries. A heterologous peptide insertion library refers to a collection of rAAV vectors that carry the same peptide insertion at different insertion sites in the virus capsid, e.g., at different positions within a given variable region of the capsid. Generally, the capsid proteins used comprise AAV genomes that contain modified rep and cap sequences to prevent the replication of the virus under conditions in which it could normally replicate (co-infection of a mammalian cell along with a helper virus such as adenovirus). The members of the peptide insertion libraries may then be assayed for functional display of the peptide on the rAAV surface, tissue targeting and/or gene transduction.

[0253] The present inventors also have surprisingly discovered particular peptides that can be used to re-target AAV vectors to specific tissues, organs, or cells; in particular, providing peptides that cause rAAV vectors to target retinal tissue and/or to cross the blood-brain barrier and target neural tissue of the CNS. Without being bound by any one theory, certain peptides inserted in an AAV capsid variable region loop, such as dynein and transferrin-derived peptides were demonstrated to enhance transduction efficiency in the brain or retina and/or enhance transport of AAV particles carrying transgene across an endothelial cellular matrix, in particular across laminin-rich basement membranes such as the blood-brain barrier and the inner limiting membrane of the retina. This can provide enhanced transport of AAV particles encapsidating a transgene across an endothelial cellular matrix. Such peptides, and others, are described below.

### 5.2.2 Neural tissue-homing Peptides

[0254] Another aspect of the present invention relates to capsid proteins comprising peptide insertions designed to confer or enhance neurotropic properties. Neural tissue includes, but is not limited to, neurons, astrocytes, glia, endothelial cells, and the laminin-rich basement cellular matrix protecting the brain. The invention involves engineering rAAV capsids to display peptides that promote targeting neuronal tissue and neuronal transduction. Examples include peptides from (i) a region of human axonemal dynein (HAD) heavy chain tail; or a region of mouse axonemal dynein (MAD) heavy chain tail; (ii) an erythropoietin (EPO) domain that binds innate repair receptor and is not erythropoietic, or a conformational analog of said domain; and (iii) brain targeting peptides.

### 5.2.2.1 rAAV-HAD Vectors

[0255] In certain embodiments, the peptide insertion is a peptide derived from regions of human axonemal dynein (HAD) heavy chain tail and the insertion is used as a neural tissue-homing peptide (or neural cell-homing peptide) and/or a retinal cell-homing peptide (aspects of which are discussed in more detail below). The peptide, referred to herein as a “HAD peptide” may be a sequence of at least 4 consecutive amino acids from HAD heavy chain tail region, or a conformation analog designed to mimic the three-dimensional structure thereof. Recombinant AAV vectors comprising one or more HAD peptides, e.g., inserted into a surface-exposed loop of an AAV capsid coat, are referred to herein as “rAAV-HAD vectors.”

[0256] Dyneins are cytoskeletal motor proteins that move along microtubules. There are two basic types: (1) Cytoplasmic dyneins and (2) Axonemal dyneins. Cytoplasmic dyneins function in transporting intracellular cargos and movement of chromosomes on mitotic spindles. Cytoplasmic dyneins usually occur as dimers of two identical heavy chains and several intermediate and light chains. Axonemal dyneins cause sliding of microtubules in axonemes, including structures in cilia and flagella. Axonemal dyneins are found in multiple forms, containing one, two or three non-identical heavy chains.

[0257] The overall structure of human axonemal dynein (HAD) involves “tail” and “head” regions. The tail comprises a dimerization domain, which recruits cargos for transport along microtubules. The head comprises a motor domain, which is composed of six AAA domains (triple ATPases) that are “force-generating” and drive the dynein motor to attach and detach, and thus “walk” along, the surface of microtubules. See, also, Toda et al., 2018, Biophysical Rev 10:677-686; Reck-Peterson, 2018, Nat Rev Mol Cell Biol; Reck-Peterson et al., 2006, “Single-Molecule Analysis of Dynein Processivity and Stepping Behavior,” Cell 126:335-348; Urnavicius, 2018, Nature 554:202; Urnavicius, 2015, Science 347:1441; and Zhang et al, 2017, Cell 169:1303. Additionally, see, e.g., Roberts, et al., 2013, “Functions and mechanics of dynein motor proteins” Nat Rev Mol Cell Biol., 14(11):713-726; Wadsworth et al., 2013, “Microtubule Motors: Doin; It without Dynactin,” Curr Biol 23(13):R563-R565; Kelkar et al., 2006, “A Common Mechanism for Cytoplasmic Dynein-Dependent Microtubule Binding Shared among Adeno-Associated Virus and Adenovirus Serotypes,”J. of Virology, 7781-7785; and Zhang et al., 2017, “Cryo-EM Reveals How Human Cytoplasmic Dynein Is Auto-Inhibited and Activated,” Cell, 169:1303-1314.

[0258] Table 2 identifies the tail and dimerization domain of the human axonemal dyneins, as well as peptides for use as peptide insertions in the engineered capsid proteins described herein. In some embodiments, insertions of at least 4 and up to 15 contiguous amino acids, or 7 contiguous amino acids, from the axonemal dynein sequences of the stem/tail region and/or the dimerization domain (NDD) are used (see also FIGS. 7A-7M).

TABLE 2
Axonemal Dynein Peptides

| | | | | SEQ |
|---|---|---|---|---|
| | STEM/TAIL | NDD | | ID |
| UniProt | SEQUENCE | SEQUENCE | Peptides | NO: |
| DYH1_HUMAN (Q9P2D7) | 1-1542 | 1-200 | K¹⁷⁴MQVPFQ | 1 |
| (SEQ ID NO. 97) | | | | |
| DYH2_HUMAN (Q9P225) | 1-1764 | 1-200 | | |
| (SEQ ID NO. 98) | | | | |
| DYH3_HUMAN (Q8TD57) | 1-1390 | 1-200 | T⁹²LAAPFK | 2 |
| (SEQ ID NO. 99) | | | | |
| DYH5_HUMAN (Q8TE73) | 1-1941 | 1-200 | | |
| (SEQ ID NO. 100) | | | | |
| DYH6_HUMAN (Q9C0G6) | 1-1433 | 1-200 | | |
| (SEQ ID NO. 101) | | | | |
| DYH7_HUMAN (Q8WXX0) | 1-1289 | 1-200 | Q⁵⁵QAAPSF | 3 |
| (SEQ ID NO. 102) | | | | |
| DYH8_HUMAN (Q96JB1) | 1-1807 | 1-200 | R¹⁴⁶⁵YNAPFK | 4 |
| (SEQ ID NO. 103) | | | | |
| DYH9_HUMAN (Q9NYC9) | 1-1831 | 1-200 | | |
| (SEQ ID NO. 104) | | | | |
| DYH10_HUMAN (Q8IVF4) | 1-1793 | 1-200 | | |
| (SEQ ID NO. 105) | | | | |
| DYH11_HUMAN (Q96DT5) | 1-1854 | 1-200 | | |
| (SEQ ID NO. 106) | | | | |
| DYH12_HUMAN (Q6ZR08) | 1-1214 | 1-200 | L¹⁸KLPPIV | 5 |
| (SEQ ID NO. 107) | | | P⁸⁷⁹FIKPFE | 6 |
| DYH14_HUMAN | | 1-200 | | |
| (Q0VDD8) (SEQ ID NO. | | | | |
| 108) | | | | |
| DYH17_HUMAN (Q9UFH2) | 1-1794 | 1-200 | T⁸⁵⁴LSLPWK | 7 |
| (SEQ ID NO. 109) | | | | |

[0259] In some embodiments, the peptide for insertion in an AAV capsid is designed from the dimerization domain (NDD) of a HAD heavy chain tail region. In alternate embodiments, peptides corresponding to the amino acid sequences of the remainder of the HAD heavy chain tail (i.e., excluding the dynein motor domain) can be used. In some embodiments, the peptide insertion comprises at least 4, in an embodiment, is 7, contiguous amino acids, and is up to 12 or 15 contiguous amino acids from a dimerization domain of a HAD heavy chain tail. In particular embodiments, the peptide insertion comprises at least 4, is 7 contiguous amino acids, and is up to 12 or 15 contiguous amino acids from the group consisting of (depicted in FIGS. 7A-7M): amino acids (“aa”) 1-1542 of DYH1_HUMAN UniProtKB-Q9P2D7 (SEQ ID NO. 97); aa 1-1764 of DYH2_HUMAN UniProtKB-Q9P225 (SEQ ID NO. 98); aa 1-1390 of DYH3_HUMAN UniProtKB-Q8TD57 (SEQ ID NO. 99); aa 1-1941 of DYH5_HUMAN UniProtKB-Q8TE73 (SEQ ID NO. 100); aa 1-1433 of DYH6_HUMAN UniProtKB-Q9C0G6 (SEQ ID NO. 101); aa 1-1289 of DYH7_HUMAN UniProtKB-Q8WXX0 (SEQ ID NO. 102); aa 1-1807 of DYH8_HUMAN UniProtKB-Q96JB1 (SEQ ID NO. 3); aa 1-1831 of DYH9_HUMAN UniProtKB-Q9NYC9 (SEQ ID NO. 104); aa 1-1793 of DYH10_HUMAN UniProtKB-Q8IVF4 (SEQ ID NO. 105); aa 1-1854 of DYH11_HUMAN UniProtKB-Q96DT5 (SEQ ID NO. 106); aa 1-1214 of DYH12_HUMAN UniProtKB-Q6ZR08 (SEQ ID NO. 107); aa 1-200 of DYH14_HUMAN UniProtKB-Q0VDD8 (SEQ ID NO. 108); and aa 1-1794 of DYH17_HUMAN UniProtKB-Q9UFH2 (SEQ ID NO. 109)) and promotes neural tissue tropism and/or transduction of the capsid engineered to contain the peptide. In more preferred embodiments, the peptide insertion comprises at least 4 contiguous amino acids, is 7 contiguous amino acids, and is up to 12 or 15 contiguous amino acids from residues 1-200 of any one of the dynein heavy chain sequences recited above, that is, any one from the group consisting of aa 1-1542 of DYH1_HUMAN UniProtKB-Q9P2D7 (SEQ ID NO. 97); aa 1-1764 of DYH2_HUMAN UniProtKB-Q9P225 (SEQ ID NO. 98); aa 1-1390 of DYH3_HUMAN UniProtKB-Q8TD57 (SEQ ID NO. 99); aa 1-1941 of DYH5_HUMAN UniProtKB-Q8TE73 (SEQ ID NO. 100); aa 1-1433 of DYH6_HUMAN UniProtKB-Q9C0G6 (SEQ ID NO. 101); aa 1-1289 of DYH7_HUMAN UniProtKB-Q8WXX0 (SEQ ID NO. 102);; aa 1-1807 of DYH8_HUMAN UniProtKB-Q96JB1 (SEQ ID NO. 3); aa 1-1831 of DYH9_HUMAN UniProtKB-Q9NYC9 (SEQ ID NO. 104); aa 1-1793 of DYH10_HUMAN UniProtKB-Q8IVF4 (SEQ ID NO. 105); aa 1-1854 of DYH11_HUMAN UniProtKB-Q96DT5 (SEQ ID NO. 106); aa 1-1214 of DYH12_HUMAN UniProtKB-Q6ZR08 (SEQ ID NO. 107); aa 1-200 of DYH14_HUMAN UniProtKB-Q0VDD8 (SEQ ID NO. 108); and aa 1-1794 of DYH17_HUMAN UniProtKB-Q9UFH2 (SEQ ID NO. 109))) and promotes neural tissue or specific neural cell tropism and/or transduction of the capsid engineered to contain the peptide. In still more preferred embodiments, the peptide insertion is 7 contiguous amino acids from any one of the dynein heavy chain sequences of FIGS. 7A-7M, or is 7 contiguous amino acids from residues 1-200 of any one of the dynein heavy chain sequences (FIGS. 7A-7M).

[0260] In particular embodiments, the peptide insertion is at least or consists of 4, 5, 6, or 7 contiguous amino acids from the group consisting of: KMQVPFQ (SEQ ID NO: 1); TLAAPFK (SEQ ID NO: 2); QQAAPSF (SEQ ID NO: 3); RYNAPFK (SEQ ID NO: 4); LKLPPIV (SEQ ID NO: 5); PFIKPFE (SEQ ID NO: 6); and TLSLPWK (SEQ ID NO: 7) and promotes neural tissue tropism and/or transduction of the capsid engineered to contain the peptide. In still more particular embodiments, the peptide insertion consists of a peptide from the group consisting of: KMQVPFQ (SEQ ID NO: 1); TLAAPFK (SEQ ID NO: 2); QQAAPSF (SEQ ID NO: 3); RYNAPFK (SEQ ID NO: 4); LKLPPIV (SEQ ID NO: 5); PFIKPFE (SEQ ID NO: 6); and TLSLPWK (SEQ ID NO: 7) and promotes neural tissue tropism and/or transduction of the capsid engineered to contain the peptide. In one embodiment of particular interest, the peptide insertion comprises or consists of the amino acid sequence TLAAPFK (SEQ ID NO: 2).

[0261] While not wishing to be bound to any theory, the rAAV-HAD vectors of the present invention are based on the principle that the rAAV capsid with the incorporated peptide will display multiple copies of the human dynein dimerization domain on the rAAV surface. Upon transduction of a target human cell, such rAAVs may be loaded onto endogenous axonemal dynein in the target cell directly or via recruitment by dynein adaptors in the cell. Loading of such rAAVs onto axonemal dynein may facilitate dynein multimerization and/or stabilize conformation of the dynein to enhance transport activity.

[0262] The selection of peptide domains from human axonemal heavy chain dynein for incorporation into AAV capsids to promote rAAV binding to the dynein itself, while counter-intuitive, provides several advantages:
[0263] (1) Axonemal dyneins occur in ciliary neurons and, therefore, the rAAV-HAD vectors of the invention may demonstrate enhanced neurotropic properties in sensory neurons, olfactory neurons, auditory neurons, and photoreceptors which contain such structures. Targeting axonemal dynein, as opposed to cytoplasmic dynein which occurs in all cells, may also confer increased selectivity for neural tissue;
[0264] (2) Surprisingly, the heavy chain dimerization peptide does not interfere with activity of the axonemal dynein motor domain (in contrast to prior failed attempts to engineer AAV2 capsid using synthetic dynein light-chain (LC8) peptides to target cytoplasmic dynein, see, e.g., Bergen et al., 2007, “Evaluation of an LC8-Binding Peptide for the Attachment of Artificial Cargo,” Mol Pharm 4(1): 119-128; and Xu et al., 2005, “A combination of mutations enhances the neurotropism of AAV2,” Virology, 341: 203-214).
[0265] (3) The HAD peptides used herein correspond to human protein and should be less immunogenic than synthetic peptides (e.g., used by Terwilliger, 2005, Virol 341:203; see also WO 2016/119150 A2); and should work in human subjects (unlike prior art AAV9 capsids containing randomized peptide populations selected in mice—See, e.g., Hordeaux et al., 2018 Mol Ther 26:664, “The Neurotropic Properties of AAV-PHP.B are limited to C57BL/6J Mice; Matsuzaki et al, 2018, Neurosci Lett 665: 182-188 “Intravenous administration of the AAV-PHP.B capsid fails to upregulate transduction efficiency in the marmoset brain”).

[0266] In particular, when a HAD peptide is engineered into AAV capsids such as AAV9, AAVrh10 and AAVrh20 (which display strong tropisms for the CNS), efficiency of delivery and delivery to the CNS is further enhanced. See also, Castle, et al., 2014, “Long-distance Axonal Transport of AAV9 is Driven by Dynein and Kinesin-2 and Is Trafficked in a Highly Motile Rab7-positive Compartment” _i Molecular Therapy, 22(3):554-566.

[0267] The HAD peptide can be inserted into an AAV capsid, for example at sites that allow surface exposure of the peptide, such as within variable surface-exposed loops, and, in other examples, sites described herein corresponding to VR-I, VR-IV or VR-VIII of AAV9. In some embodiments, rAAV vectors comprising a HAD peptide cross the blood-brain barrier and reach the CNS.

[0268] In some embodiments, a peptide from a mouse axonemal dynein (MAD) heavy chain tail is used. MAD heavy chain tail also provides neural-tissue homing domains from which peptides may be derived for insertion into AAV capsid proteins and for use in re-directing rAAVs to cross the blood-brain barrier and target CNS tissues (see also, Deverman et al., 2016, “Cre-dependent selection yields AAV variants for widespread gene transfer to the adult brain” Nat Biotechnology, 34(2):204-209).

[0269] In some embodiments, the neural tissue-homing domain comprises the amino acid sequence TLAVPFK (SEQ ID NO: 27); and the peptide insertion derived therefrom comprises or consists of the TLAVPFK (SEQ ID NO: 27) sequence. In some embodiments, the peptide insertion comprises or consists of four, five, or six consecutive amino acids from TLAVPFK (SEQ ID NO: 27). In particular embodiments, the capsid protein is an AAV9 capsid protein and the TLAVPFK (SEQ ID NO: 27) insertion occurs immediately after at least one of the amino acid residues 451 to 461. In particular embodiments, the TLAVPFK (SEQ ID NO: 27) insertion occurs after an amino acid residue I451, N452, G453, S454, G455, Q456, N457, Q458, Q459, T460, or L461 of the AAV9 capsid (SEQ ID NO: 118), and in certain embodiments is after S454 of the AAV9 capsid. In other embodiments, the capsid protein is from at least one AAV type selected from AAV serotype 1 (AAV1), serotype 2 (AAV2), serotype 3 (AAV3), serotype 4 (AAV4), serotype 5 (AAV5), serotype 6 (AAV6), serotype 7 (AAV7), serotype 8 (AAV8), serotype rh8 (AAVrh8, serotype 9e (AAV9e), serotype rh10 (AAVrh10), serotype rh20 (AAVrh20), serotype rh39 (AAVrh39), serotype hu.37 (AAVhu.37), and serotype rh74 (AAVrh74, version 1 and 2) (see FIG. 8), and the TLAVPFK (SEQ ID NO: 27) peptide insertion occurs immediately after an amino acid residue in the AAV capsid that corresponds to one of the amino acid residues 451 to 461 of the AAV9 capsid. The alignment of these different AAV serotypes, as shown in FIG. 8, indicates corresponding amino acid residues in the different amino acid sequences. In some particular embodiments, the TLAVPFK (SEQ ID NO: 27) peptide insertion occurs immediately after one of the amino acid residues within: 450-459 of AAV1 capsid; 449-458 of AAV2 capsid; 449-459 of AAV3 capsid; 443-453 of AAV4 capsid; 442-445 of AAV5 capsid; 450-459 of AAV6 capsid; 451-461 of AAV7 capsid; 451-461 of AAV8 capsid; 451-461 of AAV9 capsid; 452-461 of AAV9e capsid; 452-461 of AAVrh10 capsid; 452-461 of AAVrh20 capsid; or 452-461 of AAVhu.37, in the sequences depicted in FIG. 8. In some embodiments, the TLAVPFK (SEQ ID NO: 27) peptide insertion occurs immediately after an amino acid residue corresponding 588 of AAV9 capsid protein (see FIG. 8), where said peptide insertion is surface exposed when the capsid protein is packaged as an AAV particle.

[0270] In some embodiments, the TLAVPFK (SEQ ID NO: 27) peptide insertion does not occur in any of the sites described in US 2015/0079038 to Deverman et al., particularly, but not limited to an insertion in the VR-VIII of the AAV capsid protein, more particularly is not inserted into the AAV capsid protein at a position corresponding to between amino acids 588 to 589 of AAV9 (SEQ ID NO: 118), or after one of the amino acids corresponding to amino acids 586 to 592 (including 587, 588, 589 or 590) of AAV9 (as depicted in FIG. 8). In other embodiments, the peptide insertion at any site in the capsid protein, does not comprise or consist of the peptide TLAVPFK (SEQ ID NO: 27), or of the peptide QAVRTSL (SEQ ID NO: 23), or of the peptide TLAGPFK (SEQ ID NO: 53). In other embodiments, the peptide insertion does not comprise or consist of the peptide TLAVPFK (SEQ ID NO: 27), or of the peptide QAVRTSL (SEQ ID NO: 23), or of the peptide TLAGPFK (SEQ ID NO: 53) inserted in the VR-VIII loop of the AAV capsid protein, more particularly is not inserted into AAV capsid protein at a position corresponding to between amino acids 588 to 589 of AAV9, or after one of the amino acids corresponding to amino acids 586 to 592 (including 587, 588, 589 or 590) of AAV9 (as depicted in FIG. 8).

### 5.2.2.2 rAAV-EPO Vectors

[0271] In certain embodiments, the peptide insertion is a peptide derived from regions of erythropoietin (EPO). The peptide, referred to herein as a “EPO peptide” may be a sequence of consecutive amino acids from an EPO domain that binds IRR but is not erythropoietic, or a conformation analog designed to mimic the three-dimensional structure of said domain. Recombinant AAV vectors comprising one or more EPO peptides, e.g., inserted into a surface-exposed loop of an AAV capsid coat, are referred to herein as a “rAAV-EPO vectors.”

[0272] Erythropoietin (EPO) is primarily made in the kidney and helps increase red blood cell production in response to hypoxia. It has been found that EPO also crosses the blood brain barrier, e.g., by receptor-mediated cytosis, being detected in the cerebro-spinal fluid following systemic administration of high doses. It also has been found that EPO exerts a protective effect on the CNS, in terms of reducing inflammation, preventing neuronal damage, and promoting repair (see, e.g., Cerami, 2001, “Beyond erythropoiesis: novel applications for recombinant human erythropoietin,” Semin Hematol. 38(3 Supp 7): 33-39). To reduce the deleterious side effect of erythropoiesis, and risk of thrombosis, however, non-erythropoeitic forms were developed, including ARA290. ARA290 is a nonerythropoietic analog of EPO, an 11 amino acid synthetic peptide, which binds Innate Repair Receptor (IRR), a receptor for EPO separate from the erythropoietic receptor that is expressed in response to hypoxia, injury, inflammation, or brain damage, and which exerts therapeutic effect in protecting brain tissue (see, e.g., Chen et al., 2013, “Therapeutic effects of nonerythropoietic erythropoietin analog ARA290 in experimental autoimmune encephalomyelitis rat,”J ofNeuroimmunology, 268:64-70; Collino, et al., 2015, “Flipping the molecular switch for innate protection and repair of tissues: Long-lasting effects of a non-erythropoietic small peptide engineered from erythropoietin,” Pharmacology & Therapeutics, 151:32-40; and Liu et al., 2014, “Erythropoietin-derived non-erythropoietic ameliorates experimental autoimmune neuritis by inflammation suppression and tissue protection,” PLOS One, 9(3): 1-10).

[0273] In some embodiments of the invention, the peptide insertion derived from EPO comprises at least 4 and up to 20 contiguous amino acids, and in certain embodiments no more than 12 contiguous amino acids, from the amino acid sequence of erythropoietin that is not erythropoietic and that binds Innate Repair Receptor (IRR); or a synthetic peptide modeled on 4-20 non-contiguous amino acids that form a conformation analog of erythropoietin that is not erythropoietic and that binds Innate Repair Receptor (IRR). In specific embodiments, the peptide insertion comprises at least 4 and up to 11 contiguous amino acids, and preferably 7 contiguous amino acids, from the synthetic peptide “ARA290,” having amino acid sequence QEQLERALNSS (SEQ ID NO: 8). In certain embodiments, the peptide insertion comprises or consists of the ARA290 sequence QEQLERALNSS (SEQ ID NO: 8). In some embodiments, the EPO peptide comprises or consists of hyposialated EPO (hsEPO), or hsEPO with one or more amino acid modifications to increase its serum half life

[0274] The EPO peptide can be inserted into an AAV capsid, for example at sites that allow surface exposure of the peptide, such as within variable surface-exposed loops, and, in more examples, sites described herein in an AAV capsid protein corresponding to VR-I, VR-IV or VR-VIII of AAV9 or may be inserted after the first amino acid of VP2, e.g. immediately after amino acid 137 (AAV4, AAV4-4, and AAV5) or immediately after amino acid 138 (AAV1, AAV2, AAV3, AAV3-3, AAV6, AAV7, AAV8, AAV9, AAV9e, rh.10, rh.20, rh.39, rh.74v1, rh.74v2, and hu.37) (FIG. 8). In some embodiments, rAAV vectors comprising an EPO peptide cross the blood-brain barrier and reach the CNS. Use of EPO peptides in rAAVs provides the additional advantage of reducing inflammation in at least two ways. First, by binding IRR, rAAV-EPO vectors trigger a subject's anti-inflammatory response, thus off-setting inflammation that may result from introduction of foreign agents (the rAAV vectors) to the subject. Second, ARA290 has been known for having a relatively short half-life, which provides the advantage of rapid clearance, and thus reduced time to trigger inflammation.

[0275] 5.2.2.3 rAAV-SRL Vectors

[0276] In certain embodiments, the peptide insertion is a peptide derived from regions of brain-homing domains having an SRL (serine-arginine-lysine) motif. The peptide, referred to herein as a “SRL peptide” may be a sequence of consecutive amino acids from a domain having an SRL motif that targets brain tissue, or a conformation analog designed to mimic the three-dimensional structure of said domain. Recombinant AAV vectors comprising one or more SRL peptides, e.g., inserted into a surface-exposed loop of an AAV capsid coat, are referred to herein as “rAAV-SRL vectors.”

[0277] A family of brain-homing peptides has been reported, where each peptide in the family contains the common amino acid motif, SRL (serine-arginine-leucine), but different flanking amino acid sequences (see, e.g., U.S. Pat. No. 5,622,699). In some embodiments, the peptide insertion from said brain-homing domain comprises at least 4, 5, 6, 7, 8 or all 9 amino acids from sequence CLSSRLDAC (SEQ ID NO: 11), particularly including the SRL motif. In some embodiments, the peptide insertion comprises or consists of the sequence CLSSRLDAC (SEQ ID NO: 11).

[0278] It has been found that both of the cysteine residues in certain homing peptides can be deleted without significantly affecting the organ homing activity of the peptide. For example, a peptide having the sequence LSSRLDA (SEQ ID NO: 10) also can be a brain-homing peptide. Methods for determining the necessity of a cysteine residue or of amino acid residues N-terminal or C-terminal to a cysteine residue for organ homing activity of a peptide are routine and well known in the art. Thus, in some embodiments, the peptide insertion comprises at least 4, 5, 6, or all 7 amino acids from sequence LSSRLDA (SEQ ID NO: 10). In some embodiments, the peptide insertion comprises or consists of the sequence LSSRLDA (SEQ ID NO: 10).

[0279] The SRL peptide can be inserted into an AAV capsid, for example at sites that allow surface exposure of the peptide, such as within variable surface-exposed loops, and, in more examples, sites described herein corresponding to VR-I, VR-IV, or VR-VIII of AAV9 or may be inserted after the first amino acid of VP2, e.g. immediately after amino acid 137 (AAV4, AAV4-4, and AAV5) or immediately after amino acid 138 (AAV1, AAV2, AAV3, AAV3-3, AAV6, AAV7, AAV8, AAV9, AAV9e, rh.10, rh.20, rh.39, rh.74v1, rh.74v2, and hu.37) (FIG. 8). In some embodiments, rAAV vectors comprising an SRL peptide cross the blood-brain barrier and reach the CNS.

### 5.2.3 Cytoplasmic Dynein-Homing Peptides

[0280] Another aspect of the present invention relates to capsid proteins comprising peptide insertions designed to confer or enhance homing to cytoplasmic dynein. Examples include peptides derived from regions of cytoplasmic dynein-homing domains, such as a dynein light chain-homing domain (see, e.g., Midoux, et al., 2017, “Peptides mediating DNA transport on microtubules and their impact on non-viral gene transfer efficiency,” Bioscience Reports (review article), 37 BSR20170995). The peptide, referred to herein as a “cytoplasmic dynein-homing peptide” may be a sequence of consecutive amino acids from a cytoplasmic dynein-homing region of a protein, or a conformation analog designed to mimic the three-dimensional structure thereof. These peptides include SITLVKSTQTV (SEQ ID NO: 21) (alternatively, CITLVKSTQTV (SEQ ID NO: 54)), TILSRSTQTG (SEQ ID NO: 22), VVMVGEKPITITQHSVETEG (SEQ ID NO: 25), RSSEEDKSTQTT (SEQ ID NO: 26), KSTEDKSTQTP (SEQ ID NO: 46); LGHFTRSTQTS (SEQ ID NO: 47); GVQMAKSTQTF (SEQ ID NO: 48); PKTRNSQTQTD (SEQ ID NO: 49); VTTQNTASQTM (SEQ ID NO: 50); and KSSQDKSTQTTGD (SEQ ID NO: 51). Peptides or domains of proteins that associate with the light chain of cytoplasmic dynein may have the motif TQT (threonine-glutamine-threonine) or STQT (serine-threonine-glutamine-threonine) (SEQ ID NO: 55) or even KSTQT (lysine-serine-threonine-glutamine-threonine) (SEQ ID NO: 56). Accordingly, in certain embodiments, the cytoplasmic dynein-homing peptide is a portion of a peptide which contains the TQT, STQT (SEQ ID NO: 55) or KSTQT (SEQ ID NO: 56) motif and has the cytoplasmic dynein-homing activity.

[0281] In some embodiments, the peptide insertion from said dynein light-chain homing domain comprises at least 4, 5, 6, 7, 8, 9, 10, or all 11 consecutive amino acids of sequence SITLVKSTQTV (SEQ ID NO: 21), preferably which contains the TQT, STQT (SEQ ID NO: 55) or KSTQT (SEQ ID NO: 56) motif and/or has the cytoplasmic dynein-homing activity. In some embodiments, the peptide insertion consists of at least 4, 5, 6, 7, 8, 9, 10, or all 11 consecutive amino acids of sequence SITLVKSTQTV (SEQ ID NO: 21), preferably which contains the TQT, STQT (SEQ ID NO: 55) or KSTQT (SEQ ID NO: 56) motif and/or has the cytoplasmic dynein-homing activity.

[0282] In some embodiments, the peptide insertion from said dynein light-chain homing domain comprises at least 4, 5, 6, 7, 8, 9, or all 10 consecutive amino acids of sequence TILSRSTQTG (SEQ ID NO: 22), preferably which contains the TQT or STQT (SEQ ID NO: 55) motif and/or has the cytoplasmic dynein-homing activity. In some embodiments, the peptide insertion consists of at least 4, 5, 6, 7, 8, 9, or all 10 consecutive amino acids of sequence TILSRSTQTG (SEQ ID NO: 22), preferably which contains the TQT or STQT (SEQ ID NO: 55) motif and/or has the cytoplasmic dynein-homing activity.

[0283] In some embodiments, the peptide insertion from said dynein light-chain homing domain comprises at least 4 and up to all 20 consecutive amino acids of sequence VVMVGEKPITITQHSVETEG (SEQ ID NO: 25). In some embodiments, the peptide insertion consists of at least 4 and up to all 20 consecutive amino acids of sequence VVMVGEKPITITQHSVETEG (SEQ ID NO: 25). In some embodiments, the peptide insertion comprises or consists of 7, 8, 9, 10, 11, 12, 13, or 14 or 15 consecutive amino acids of sequence VVMVGEKPITITQHSVETEG (SEQ ID NO: 25).

[0284] In some embodiments, the peptide insertion from said dynein light-chain homing domain comprises at least 4, 5, 6, 7, 8, 9, 10, 11, or all 12 consecutive amino acids of sequence RSSEEDKSTQTT (SEQ ID NO: 26), preferably which contains the TQT, STQT (SEQ ID NO: 55) or KSTQT (SEQ ID NO: 56) motif and/or has the cytoplasmic dynein-homing activity. In some embodiments, the peptide insertion consists of at least 4, 5, 6, 7, 8, 9, 10, 11, or 12 consecutive amino acids of sequence RSSEEDKSTQTT (SEQ ID NO: 26), preferably which contains the TQT, STQT (SEQ ID NO: 55) or KSTQT (SEQ ID NO: 56) motif and/or has the cytoplasmic dynein-homing activity.

[0285] In some embodiments, the peptide insertion from said dynein light-chain homing domain comprises at least 4, 5, 6, 7, 8, 9, 10, 11, or 12 consecutive amino acids of one of the peptides having the sequence KSTEDKSTQTP (SEQ ID NO: 46); LGHFTRSTQTS (SEQ ID NO: 47); GVQMAKSTQTF (SEQ ID NO: 48); PKTRNSQTQTD (SEQ ID NO: 49); VTTQNTASQTM (SEQ ID NO: 50); or KSSQDKSTQTTGD (SEQ ID NO: 51), preferably which contains the TQT, STQT (SEQ ID NO: 55) or KSTQT (SEQ ID NO: 56) motif and/or has the cytoplasmic dynein-homing activity. In some embodiments, the peptide insertion consists of at least 4, 5, 6, 7, 8, 9, 10, 11, 12 or 13 consecutive amino acids of one of the peptides having the sequence KSTEDKSTQTP (SEQ ID NO: 46); LGHFTRSTQTS (SEQ ID NO: 47); GVQMAKSTQTF (SEQ ID NO: 48); PKTRNSQTQTD (SEQ ID NO: 49); VTTQNTASQTM (SEQ ID NO: 50); or KSSQDKSTQTTGD (SEQ ID NO: 51), preferably which contains the TQT, STQT (SEQ ID NO: 55) or KSTQT (SEQ ID NO: 56) motif and/or has the cytoplasmic dynein-homing activity.

[0286] The cytoplasmic dynein-homing peptide can be inserted into an AAV capsid, for example, at sites that allow surface exposure of the peptide, such as within variable surface-exposed loops, and, in more examples, sites described herein corresponding to VR-IV or VIII of AAV9 or may be inserted after the first amino acid of VP2, e.g. immediately after amino acid 137 (AAV4, AAV4-4, and AAV5) or immediately after amino acid 138 (AAV1, AAV2, AAV3, AAV3-3, AAV6, AAV7, AAV8, AAV9, AAV9e, rh.10, rh.20, rh.39, rh.74v1, rh.74v2, and hu.37) (FIG. 8).

### 5.2.4 Bone-Homing Peptides

[0287] Another aspect of the present invention relates to capsid proteins comprising peptide insertions designed to confer or enhance bone-homing properties. Examples include peptides from a bone-binding domain of a protein, or a conformational analog of said domain. A peptide from a bone-binding or bone-homing domain is referred to as a bone-homing peptide (bone tissue-homing or bone-cell or cell-matrix-homing).

[0288] In certain embodiments, the peptide insertion may be a sequence of consecutive amino acids from a HA-binding domain that targets bone tissue, or a conformation analog designed to mimic the three-dimensional structure of said domain. For example, a six to eight residue stretch of L-Asp has been shown to enhance targeting of an enzyme to hydroxyapatite (see, e.g., Nishioka, et al., 2006, “Enhancement of drug delivery to bone: Characterization of human tissue-nonspecific alkaline phosphatase tagged with an acidic oligopeptide,”Mol Genet Metab. 88(3):244-255; and Kasugai, et al., 2000, “Selective drug delivery system to bone: small peptide (Asp)6 (SEQ ID NO: 57) conjugation,” J Bone Miner Res. 15(5):936-943).

[0289] In particular embodiments, the peptide insertion from said HA-binding domain comprises at least 4, 5, 6, 7, or all 8 amino acids from sequence DDDDDDDD (SEQ ID NO: 9). In some embodiments, the peptide insertion consists of at least 4, 5, 6, 7, or all 8 amino acids from sequence DDDDDDDD (SEQ ID NO: 9). In a particular embodiment, the peptide insertion comprises or consists of the DDDDDDDD (SEQ ID NO: 9) sequence.

[0290] The bone-homing peptide can be inserted into an AAV capsid, for example at sites that allow surface exposure of the peptide, such as within variable surface-exposed loops, and, in more examples, sites described herein in an AAV capsid protein corresponding to VR-I, VR-IV, or VR-VIII of AAV9 or may be inserted after the first amino acid of VP2, that is immediately after amino acid 137 (AAV4, AAV4-4, and AAV5) or immediately after amino acid 138 (AAV1, AAV3, AAV3-3, AAV6, AAV7, AAV8, AAV9, AAV9e, rh.10, rh.20, rh.39, rh.74v1, rh.74v2, and hu.37) (FIG. 8). Recombinant AAV vectors comprising one or more bone-homing peptides, e.g., inserted into a surface-exposed loop of an AAV capsid coat, are referred to herein as “rAAV bone-homing vectors.” In particular embodiments, the capsid protein is an AAV9 capsid protein and the bone-homing insertion occurs immediately after at least one of the amino acid residues 451 to 461 of the AAV9 capsid or immediately after amino acid 138. In other embodiments, the capsid protein is from at least one AAV type selected from AAV1, AAV3, AAV4, AAV5, AAV6, AAV7, AAV8, AAVrh8, AAV9, AAV9e, AAVrh10, AAVrh20, AAVhu.37, AAVrh39, and AAVrh74 (verisons 1 and 2) (see FIG. 8), and the bone-homing peptide insertion occurs immediately after an amino acid residue corresponding to at least one of the amino acid residues 451 to 461 of AAV9. The alignments of these different AAV serotypes, as shown in FIG. 8, indicates corresponding amino acid residues in the different amino acid sequences.

### 5.2.5 Kidney-Homing Peptides

[0291] Another aspect of the present invention relates to capsid proteins comprising peptide insertions designed to confer or enhance kidney-homing properties, including homing to kidney tissue, kidney cells or kidney cell matrix. Examples include peptides from a kidney-binding domain of a protein, or a conformational analog of said domain. A peptide from a kidney-binding or kidney-homing domain is referred to as a kidney-homing peptide. In certain embodiments, the kidney-homing peptide preferentially targets the kidney as compared to the liver, and relative to an AAV that has not been engineered to contain the kidney-homing peptide.

[0292] In certain embodiments, the peptide insertion may be a sequence of consecutive amino acids from a domain that targets kidney tissue, or a conformation analog designed to mimic the three-dimensional structure of said domain. In some embodiments, the kidney-homing domain comprises the sequence CLPVASC (SEQ ID NO: 12) (see, e.g., U.S. Pat. No. 5,622,699). In some embodiments, the peptide insertion from said kidney-homing domain comprises at least 4, 5, 6, or all 7 amino acids from sequence CLPVASC (SEQ ID NO: 12). In some embodiments, the peptide insertion comprises or consists of the sequence CLPVASC (SEQ ID NO: 12).

[0293] It has been found that both of the cysteine residues in certain homing peptides can be deleted without significantly affecting the organ homing activity of the peptide. For example, a peptide having the sequence LPVAS (SEQ ID NO: 13) also can be a kidney-homing peptide. Methods for determining the necessity of a cysteine residue or of amino acid residues N-terminal or C-terminal to a cysteine residue for organ homing activity of a peptide are routine and well known in the art. Thus, in some embodiments, the peptide insertion comprises at least 4 or all 5 amino acids from sequence LPVAS (SEQ ID NO: 13). In some embodiments, the peptide insertion comprises or consists of the sequence LPVAS (SEQ ID NO: 13).

[0294] The kidney-homing peptide can be inserted into an AAV capsid, for example, at sites that allow surface exposure of the peptide, such as within variable surface-exposed loops, and, in more examples, sites described herein corresponding to VR-I, VR-IV or VR-VIII of AAV9 or may be inserted after the first amino acid of VP2, e.g. immediately after amino acid 137 (AAV4, AAV4-4, and AAV5) or immediately after amino acid 138 (AAV1, AAV2, AAV3, AAV3-3, AAV6, AAV7, AAV8, AAV9, AAV9e, rh.10, rh.20, rh.39, rh.74v1, rh.74v2, and hu.37) (FIG. 8). Recombinant AAV vectors comprising one or more kidney-homing peptides, e.g., inserted into a surface-exposed loop of an AAV capsid coat, are referred to herein as “rAAV kidney-homing vectors.” In particular embodiments, the capsid protein is an AAV9 capsid protein and the kidney-homing peptide insertion occurs immediately after at least one of the amino acid residues 451 to 461 of the AAV9 capsid. In other embodiments, the capsid protein is from at least one AAV type selected from AAV1, AAV3, AAV4, AAV5, AAV6, AAV7, AAV8, AAVrh8, AAV9, AAV9e, AAVrh10, AAVrh20, AAVrh39, AAVhu.37, and AAVrh74 (version 1 and 2) (see FIG. 8), and the kidney-homing peptide insertion occurs immediately after an amino acid residue corresponding to at least one of the amino acid residues 451 to 461 of AAV9. The alignments of these different AAV serotypes, as shown in FIG. 8, indicates corresponding amino acid residues in the different amino acid sequences.

[0295] 5.2.6 Muscle-Homing Peptides

[0296] Another aspect of the present invention relates to capsid proteins comprising peptide insertions designed to confer or enhance muscle-homing properties, including homing to muscle tissue, muscle cells or muscle cell matrix. Examples include peptides from a muscle-binding domain of a protein, or a conformational analog of said domain. A peptide from a muscle-binding or muscle-homing domain is referred to as a muscle-homing peptide.

[0297] In certain embodiments, the peptide insertion may be a sequence of consecutive amino acids from a domain that targets muscle, or a conformation analog designed to mimic the three-dimensional structure of said domain. In some embodiments, the muscle-homing domain comprises the sequence ASSLNIA (SEQ ID NO: 14) (see, e.g., Samoylov, et al., 2002, “Recognition of cell-specific binding of phage display derived peptides using an acoustic wave sensor,” Biomol Eng, 18(6):269-272). In some embodiments, the peptide insertion from said muscle-homing domain comprises at least 4, 5, 6, or all 7 amino acids from sequence ASSLNIA (SEQ ID NO: 14). In some embodiments, the peptide insertion comprises or consists of the sequence ASSLNIA (SEQ ID NO: 14).

[0298] The muscle-homing peptide can be inserted into an AAV capsid, for example, at sites that allow surface exposure of the peptide, such as within variable surface-exposed loops, and, in more examples, sites described herein corresponding to VR-I, VR-IV, or VR-VIII of AAV9 or may be inserted after the first amino acid of VP2, e.g. after amino acid 137 (AAV4, AAV4-4, and AAV5) or at amino acid 138 (AAV1, AAV2, AAV3, AAV3-3, AAV6, AAV7, AAV8, AAV9, AAV9e, rh.10, rh.20, rh.39, rh.74v1, rh.74v2, and hu.37) (FIG. 8). Recombinant AAV vectors comprising one or more muscle-homing peptides, e.g., inserted into a surface-exposed loop of an AAV capsid coat, are referred to herein as “rAAV muscle-homing vectors.” In particular embodiments, the capsid protein is an AAV9 capsid protein and the muscle homing peptide insertion occurs immediately after at least one of the amino acid residues 451 to 461 of the AAV9 capsid. In other embodiments, the capsid protein is from at least one AAV type selected from AAV1, AAV3, AAV4, AAV5, AAV6, AAV7, AAV8, AAVrh8, AAV9, AAV9e, AAVrh10, AAVrh20, AAVhu.37, AAVrh39, and AAVrh74 (versions 1 and 2) (see FIG. 8), and the muscle-homing peptide insertion occurs immediately after an amino acid residue corresponding to at least one of the amino acid residues 451 to 461 of AAV9 (SEQ ID NO: 118). The alignments of these different AAV serotypes, as shown in FIG. 8, indicates corresponding amino acid residues in the different amino acid sequences.

### 5.2.7 TfR-Homing Peptides

[0299] Another aspect of the present invention relates to capsid proteins comprising peptide insertions designed to confer or enhance homing properties to transferrin receptors. Examples include peptides from transferrin receptor-binding domains of a protein, or a conformational analog of said domain. A peptide from a transferrin receptor-binding or transferrin receptor-homing domain is referred to as a transferrin receptor-homing peptide.

[0300] The human transferrin receptor (hTfR) has been studied as a model for receptor-mediated endocytosis and as a marker for cellular proliferation. The hTfR generally is highly expressed in proliferative cells (such as tumor cells), has being over-expressed at least 100-fold in oral, liver, pancreatic, and prostate cancer. This makes hTfR a useful diagnostic marker as well as a target for cancer therapies. The TfR also is expressed on the blood brain barrier. TfR is a dimer composed of two identical 95 kDa subunits and is responsible for iron uptake by a cell. Iron is carried in the blood by 80 kDa transferrin (Tf), which binds TfR to form a complex that is internalized through clathrin-coated pits. Iron is released from transferrin in the acidic region of the endosome, leaving an apotransferrin-receptor complex, which is recycled back to the cell surface and the apotransferrin (transferrin not bound to iron) also is recycled. See, e.g., Cheng, et al., 2004, “Structure of the human transferrin receptor-transferrin complex,” Cell 116(4): 565-576.

[0301] As transferrin receptors are involved in receptor-mediated transcytosis, they may serve as a “Trojan horse” in delivering cargo across the blood brain barrier, such as in delivering small molecule drugs, enzymes, or nucleic acid molecules. For example, studies in mice have shown uptake of engineered TfR-binding peptides by CEF cells that express TfR, facilitating entry into brain parenchyma via brain micro vessels over time (see, Lee et al., The FEBS Journal, 2001; and Staquicini et al, 2011, “Systemic combinatorial peptide selection yields a non-canonical iron-mimicry mechanism for targeting tumors in a mouse model of human glioblastoma,” J. of Clinical Investigation, 121(1):161-173).

[0302] In some embodiments, the TfR peptide insertion provides enhanced transport of AAV particles encapsidating a transgene across an endothelial cellular matrix.

[0303] In certain embodiments, the peptide insertion may be a sequence of consecutive amino acids from a Tf domain that binds the TfR, or a conformation analog designed to mimic the three-dimensional structure of said domain, or an iron-mimic. In some embodiments, the peptide insertion from the TfR-homing domain comprises 4, 5, 6, or all 7 amino acids from sequence HAIYPRH (SEQ ID NO: 17), or consists of the sequence HAIYPRH (SEQ ID NO: 17). In some embodiments, the peptide insertion from the TfR-homing domain comprises 4, 5, 6, 7, 8, 9, 10, 11, or all 12 amino acids from sequence THRPPMWSPVWP (SEQ ID NO: 18) or consists of the sequence THRPPMWSPVWP (SEQ ID NO: 18) (see also, US 2006/0193778).

[0304] In some embodiments, the peptide insertion from the TfR-homing domain comprises 4, 5, 6, 7, 8, or all 9 amino acids from sequence CRTIGPSVC (SEQ ID NO: 20). In some embodiments, the peptide insertion comprises or consists of the sequence CRTIGPSVC (SEQ ID NO: 20). It has been found that both of the cysteine residues in certain homing peptides can be deleted without significantly affecting the organ homing activity of the peptide and methods for determining the necessity of a cysteine residue or of amino acid residues N-terminal or C-terminal to a cysteine residue for organ homing activity of a peptide are routine and well known in the art. In some embodiments, the peptide insertion comprises at least 4, 5, 6, or all 7 amino acids from sequence RTIGPSV (SEQ ID NO: 19). In some embodiments, the peptide insertion comprises or consists of the sequence RTIGPSV (SEQ ID NO: 19).

[0305] The TfR-homing peptide can be inserted into an AAV capsid, for example, at sites that allow surface exposure of the peptide, such as within variable surface-exposed loops, and, in more examples, sites described herein corresponding to VR-I, VR-IV, or VR-VIII of AAV9 or may be inserted after the first amino acid of VP2, e.g. after amino acid 137 (AAV4, AAV4-4, and AAV5) or at amino acid 138 (AAV1, AAV2, AAV3, AAV3-3, AAV6, AAV7, AAV8, AAV9, AAV9e, rh.10, rh.20, rh.39, rh.74v1, rh.74v2, and hu.37) (FIG. 8). Recombinant AAV vectors comprising one or more TfR -homing peptides, e.g., inserted into a surface-exposed loop of an AAV capsid coat, are referred to herein as “rAAV TfR-homing vectors.”

[0306] In some embodiments, the TfR-homing domain comprises the amino acid sequence RTIGPSV (SEQ ID NO: 19); and the peptide insertion derived therefrom comprises or consists of the RTIGPSV (SEQ ID NO: 19) or CRTIGPSVC (SEQ ID NO: 20) sequence. In some embodiments, the peptide insertion comprises or consists of 4, 5, 6, or all 7 consecutive amino acids from RTIGPSV (SEQ ID NO: 19); or comprises or consists of 4, 5, 6, 7, 8, or all 9 amino acids from CRTIGPSVC (SEQ ID NO: 20). In particular embodiments, the capsid protein is an AAV9 capsid protein and the RTIGPSV (SEQ ID NO: 19) or CRTIGPSVC (SEQ ID NO: 20) insertion occurs immediately after at least one of the amino acid residues 451 to 461. In particular embodiments, the RTIGPSV (SEQ ID NO: 19) or CRTIGPSVC (SEQ ID NO: 20) insertion occurs after an amino acid residue selected from the group consisting of I451, N452, G453, S454, G455, Q456, N457, Q458, Q459, T460, and L461 of the AAV9 capsid. In other embodiments, the capsid protein is from at least one AAV type selected from AAV serotype 1 (AAV1), serotype 2 (AAV2), serotype 3 (AAV3), serotype 4 (AAV4), serotype 5 (AAV5), serotype 6 (AAV6), serotype 7 (AAV7), serotype 8 (AAV8), serotype rh8 (AAVrh8, serotype 9e (AAV9e), serotype rh10 (AAVrh10), serotype rh20 (AAVrh20), serotype hu37(AAVhu.37), serotype rh39 (AAVrh39), and serotype rh74 (AAVrh74, version 1 and 2) (see FIG. 8) and the RTIGPSV (SEQ ID NO: 19) or CRTIGPSVC (SEQ ID NO: 20) peptide insertion occurs immediately after an amino acid residue corresponding to at least one of the amino acid residues 451 to 461. The alignments of these different AAV serotypes, as shown in FIG. 8, indicates corresponding amino acid residues in the different amino acid sequences. In some particular embodiments, the RTIGPSV (SEQ ID NO: 19) or CRTIGPSVC (SEQ ID NO: 20) peptide insertion occurs immediately after one of the amino acid residues within: 450-459 of AAV1 capsid (SEQ ID NO: 110); 449-458 of AAV2 capsid (SEQ ID NO: 111); 449-459 of AAV3 capsid (SEQ ID NO: 112); 443-453 of AAV4 capsid (SEQ ID NO: 113); 442-445 of AAV5 capsid (SEQ ID NO: 114); 450-459 of AAV6 capsid (SEQ ID NO: 115); 451-461 of AAV7 capsid (SEQ ID NO: 116); 451-461 of AAV8 capsid (SEQ ID NO: 117); 451-461 of AAV9 capsid (SEQ ID NO: 118); 452-461 of AAV9e capsid (SEQ ID NO: 119); 452-461 of AAVrh10 capsid (SEQ ID NO: 120); 452-461 of AAVrh20 capsid (SEQ ID NO: 121); 452-461 of AAVhu.37 (SEQ ID NO: 122); 452-461 of AAVrh74 capsid (SEQ ID NO: 123 or SEQ ID NO: 154); or 452-461 of AAVrh39 capsid (SEQ ID NO: 124); in the sequences depicted in FIG. 8. In some embodiments, the RTIGPSV (SEQ ID NO: 19) or CRTIGPSVC (SEQ ID NO: 20) peptide insertion occurs immediately after an amino acid residue corresponding to 588 of AAV9 capsid protein (see FIG. 8), where said peptide insertion is surface exposed when the capsid protein is packaged as an AAV particle.

[0307] 5.2.8 Retinal Cell-Homing Peptides

[0308] Another aspect relates to capsid proteins comprising peptide insertions designed to confer or enhance retinal cell-homing properties. Examples include peptides from a retinal cell-binding domain of a protein, or a conformational analog of said domain. A peptide from a retinal cell-binding or retinal cell-homing domain is referred to as a retinal cell-homing peptide. The term “retinal cell” refers to one or more of the cell types found in or near the retina, including amacrine cells, bipolar cells, horizontal cells, Muller glial cells, photoreceptor cells (e.g., rods and cones), retinal ganglion cells, retinal pigmented epithelium, and the like, and in particular, human photoreceptor cells (e.g., human cone cells and/or human rod cells), human horizontal cells, human bipolar cells, human amacrine cells, as well as human retina ganglion cells (e.g., midget cells, parasol cells, bistratified cells, giant retina ganglion cells, photosensitive ganglion cells, and/or Muller glia), endothelial cells in the inner limiting membrane, and/or human retinal pigment epithelial cells in the external limiting membrane.

[0309] In certain embodiments, the peptide insertion may be a sequence of consecutive amino acids from a retinal cell-binding domain that targets retinal tissue, or a conformation analog designed to mimic the three-dimensional structure of said domain.

[0310] In particular embodiments, the peptide insertion is a peptide derived from regions of human axonemal dynein (HAD) heavy chain tail. As noted above, the peptide referred to herein as a “HAD peptide” may be a sequence of consecutive amino acids from HAD heavy chain tail region, or a conformation analog designed to mimic the three-dimensional structure thereof. Table 2, provided above, identifies the tail and dimerization domain of the human axonemal dyneins, as well as peptides for use as peptide insertions in the engineered capsid proteins described herein, including for use as retinal cell-homing peptides. In some embodiments, insertions of at least 4 and up to 15 contiguous amino acids, and preferably 7 contiguous amino acids, from the axonemal dynein sequences of the stem/tail region and/or the dimerization domain (NDD) are used as the peptide insertion for targeting retinal cells.

[0311] In some embodiments, the peptide for insertion in an AAV capsid is designed from the dimerization domain (NDD) of a HAD heavy chain tail region. In alternate embodiments, peptides corresponding to the amino acid sequences of the remainder of the HAD heavy chain tail (i.e., excluding the dynein motor domain) can be used. In some embodiments, the peptide insertion comprises at least 4, in an embodiment is 7 contiguous amino acids, and is up to 12 or 15 contiguous amino acids from a dimerization domain of a HAD heavy chain tail. In particular embodiments, the peptide insertion comprises at least 4, is 7 contiguous amino acids, and is up to 12 or 15 contiguous amino acids from the group consisting of (depicted in FIGS. 7A-7M): amino acids (“aa”) 1-1542 of DYH1_HUMAN UniProtKB-Q9P2D7 (SEQ ID NO. 97); aa 1-1764 of DYH2_HUMAN UniProtKB-Q9P225 (SEQ ID NO. 98); aa 1-1390 of DYH3_HUMAN UniProtKB-Q8TD57 (SEQ ID NO. 99); aa 1-1941 of DYH5_HUMAN UniProtKB-Q8TE73 (SEQ ID NO. 100); aa 1-1433 of DYH6_HUMAN UniProtKB-Q9C0G6 (SEQ ID NO. 101); aa 1-1289 of DYH7_HUMAN UniProtKB-Q8WXX0(SEQ ID NO. 102); aa 1-1807 of DYH8_HUMAN UniProtKB-Q96JB1 (SEQ ID NO. 3); aa 1-1831 of DYH9_HUMAN UniProtKB-Q9NYC9 (SEQ ID NO. 104); aa 1-1793 of DYH10_HUMAN UniProtKB-Q8IVF4 (SEQ ID NO. 105); aa 1-1854 of DYH11_HUMAN UniProtKB-Q96DT5 (SEQ ID NO. 106); aa 1-1214 of DYH12_HUMAN UniProtKB-Q6ZR08 (SEQ ID NO. 107); aa 1-200 of DYH14_HUMAN UniProtKB-Q0DD8 (SEQ ID NO. 108); and aa 1-1794 of DYH17_HUMAN UniProtKB-Q9UFH2 (SEQ ID NO. 109)) and is used to target engineered AAVs to retinal cells. In more preferred embodiments, the peptide insertion comprises at least 4 contiguous amino acids, is 7 contiguous amino acids, and is up to 12 or 15 contiguous amino acids from residues 1-200 of any one of the dynein heavy chain sequences recited above, that is, any one from the group consisting of amino acids (“aa”) 1-1542 of DYH1_HUMAN UniProtKB-Q9P2D7 (SEQ ID NO. 97); aa 1-1764 of DYH2_HUMAN UniProtKB Q9P225 (SEQ ID NO. 98); aa 1-1390 of DYH3_HUMAN UniProtKB-Q8TD57 (SEQ ID NO. 99); aa 1-1941 of DYH5_HUMAN UniProtKB-Q8TE73 (SEQ ID NO. 100); aa 1-1433 of DYH6_HUMAN UniProtKB-Q9C0G6 (SEQ ID NO. 101); aa 1-1289 of DYH7_HUMAN UniProtKB-Q8WXX0(SEQ ID NO. 102);; aa 1-1807 of DYH8_HUMAN UniProtKB-Q96JB1 (SEQ ID NO. 3); aa 1-1831 of DYH9_HUMAN UniProtKB-Q9NYC9 (SEQ ID NO. 104); aa 1-1793 of DYH10_HUMAN UniProtKB-Q8IVF4 (SEQ ID NO. 105); aa 1-1854 of DYH11_HUMAN UniProtKB-Q96DT5 (SEQ ID NO. 106); aa 1-1214 of DYH12_HUMAN UniProtKB-Q6ZR08 (SEQ ID NO. 107); aa 1-200 of DYH14_HUMAN UniProtKB-Q0VDD8 (SEQ ID NO. 108); and aa 1-1794 of DYH17_HUMAN UniProtKB Q9UFH2 (SEQ ID NO. 109)) for targeting retinal cells. In still more preferred embodiments, the peptide insertion is 7 contiguous amino acids from any one of the dynein heavy chain sequences of FIGS. 7A-7M; or is 7 contiguous amino acids from residues 1-200 of any one of the dynein heavy chain sequences (FIGS. 7A-7M) and is used to target engineered AAVs to retinal cells.

[0312] In particular embodiments, the peptide insertion for targeting retinal cells is at least or consists of 4, 5, 6, or 7 contiguous amino acids from the group consisting of: KMQVPFQ (SEQ ID NO: 1); TLAAPFK (SEQ ID NO: 2); QQAAPSF (SEQ ID NO: 3); RYNAPFK (SEQ ID NO: 4); LKLPPIV (SEQ ID NO: 5); PFIKPFE (SEQ ID NO: 6); and TLSLPWK (SEQ ID NO: 7). In still more particular embodiments, the peptide insertion for targeting retinal cells consists of a peptide from the group consisting of: KMQVPFQ (SEQ ID NO: 1); TLAAPFK (SEQ ID NO: 2); QQAAPSF (SEQ ID NO: 3); RYNAPFK (SEQ ID NO: 4); LKLPPIV (SEQ ID NO: 5); PFIKPFE (SEQ ID NO: 6); and TLSLPWK (SEQ ID NO: 7). In one embodiment of particular interest, the peptide insertion comprises or consists of the amino acid sequence TLAAPFK (SEQ ID NO: 2).

[0313] The HAD peptide can be inserted into an AAV capsid, for example at sites that allow surface exposure of the peptide, such as within variable surface-exposed loops, and, in more examples, sites described herein corresponding to VR-I, VR-IV or VR-VIII of AAV9 or may be inserted after the first amino acid of VP2, e.g. immediately after amino acid 137 (AAV4, AAV4-4, and AAV5) or immediately after amino acid 138 (AAV1, AAV2, AAV3, AAV3-3, AAV6, AAV7, AAV8, AAV9, AAV9e, rh.10, rh.20, rh.39, rh.74v1, rh.74v2, and hu.37) (FIG. 8). In some embodiments, rAAV vectors comprising a HAD peptide is used to target cells of the retina. In a particular embodiment, a capsid protein of AAV9 with TLAAPFK (SEQ ID NO: 2) between amino acids 588-589 (SEQ ID NO: 118) is used to target retinal cell (see, e.g., the vector used in FIG. 10, FIGS. 22A-22H, and FIGS. 23A-23C). In some embodiment, a capsid protein of a different AAV is used for targeting retinal cells, where the vector includes TLAAPFK (SEQ ID NO: 2) between amino acids corresponding to amino acids 588-589 of AAV9 (see again FIG. 8).

[0314] In preferred embodiments, the retinal cell-homing peptide causes the AAV to transduce retinal cells following local administration, such as intravitreal injection. In more preferred embodiments, the retinal cell-homing peptide causes the AAV to transduce retinal cells following systemic administration, such as intravenous injection. In most preferred embodiments, the engineered AAV for targeting and transducing retinal cells comprises a capsid protein of AAV9 with TLAAPFK (SEQ ID NO: 2) between amino acids 588-589 of SEQ ID NO: 118.

[0315] In some embodiments, the peptide insertion from a retinal cell-binding domain comprises at least 4, 5, 6, 7, 8, or all 9 amino acids from sequence LALGETTRP (SEQ ID NO: 16). In some embodiments, the peptide insertion consists of at least 4, 5, 6, 7, 8, or all 9 amino acids from sequence LALGETTRP (SEQ ID NO: 16). In some embodiments, the peptide insertion comprises at least 4, 5, 6, or all 7 amino acids from sequence LGETTRP (SEQ ID NO: 15). In particular embodiments, the peptide insertion consists of at least 4, 5, 6, or all 7 amino acids from sequence LGETTRP (SEQ ID NO: 15). In a particular embodiment, the peptide insertion consists of the LGETTRP (SEQ ID NO: 15) sequence.

[0316] The retinal cell-homing peptide can be inserted into an AAV capsid, preferably at sites that allow surface exposure of the peptide, such as within variable surface-exposed loops, and, more preferably, sites described herein corresponding to VR-I, VR-IV, or VR-VIII of AAV9, or in the corresponding position of AAV8. In particular embodiments, the capsid protein is an AAV8 capsid protein and the LGETTRP (SEQ ID NO: 15) or LALGETTRP (SEQ ID NO: 16) insertion occurs immediately after at least one of the amino acid residues 451 to 461 of the AAV8 capsid (amino acid sequence of SEQ ID NO: 117). In particular embodiments, the capsid protein is an AAV9 capsid protein and the LGETTRP (SEQ ID NO: 15) or LALGETTRP (SEQ ID NO: 16) insertion occurs immediately after at least one of the amino acid residues 451 to 461 of the AAV9 capsid and, in particular embodiments, immediately after residue 454 of the AAV9 capsid protein. In other embodiments, the capsid protein is from at least one AAV type selected from AAV1, AAV3, AAV4, AAV5 AAV6, AAV7, AAV8, AAVrh8, AAV9, AAV9e, AAVrh10, AAVrh20, AAVhu.37, AAVrh39, and AAVrh74(version 1 and version 2) (see FIG. 8), and the LGETTRP (SEQ ID NO: 15) or LALGETTRP (SEQ ID NO: 16) peptide insertion occurs immediately after an amino acid residue corresponding to at least one of the amino acid residues 451 to 461 of the AAV9 capsid or, in certain embodiments, corresponding to after the residue corresponding to residue 454 of the AAV9 capsid sequence. The alignments of these different AAV serotypes, as shown in FIG. 8, indicates corresponding amino acid residues in the different AAV capsid amino acid sequences.

[0317] In some embodiments, the retinal cell-homing peptide is not inserted into an AAV2 capsid protein, but instead the capsid protein used is from at least one AAV type selected from AAV1, AAV3, AAV4, AAV5, AAV6, AAV7, AAV8, AAVrh8, AAV9, AAV9e, AAVrh10, AAVrh20, AAVhu37, AAVrh39, and AAVrh74. In some embodiments, the retinal cell-homing peptide is not inserted between amino acids 587-588 of the AAV2 capsid protein (SEQ ID NO: 111). In some embodiments, the retinal cell-homing peptide is not inserted between amino acid residues of a different AAV serotype corresponding to amino acids 587-588 of the AAV2 capsid protein. Recombinant AAV vectors comprising one or more retinal cell-homing peptides, e.g., inserted into a surface-exposed loop of an AAV capsid coat, are referred to herein as “rAAV retinal cell-homing vectors.”

[0318] 5.2.9 Additional AAV Capsid Insertion Sites

[0319] The follow summarizes insertion sites for the peptides described herein, including the peptides in Tables 1A and 1B and the dynein peptides in Table 2 immediately after amino acid residues of AAV capsids as set forth below (see also, FIG. 8):
[0320] AAV1: 138; 262-272; 450-459; 595-593; and in a particular embodiment, between 453-454 (SEQ ID NO. 110).
[0321] AAV2: 138; 262-272; 449-458; 584-592; and in particular embodiment, between 452-453 (SEQ ID NO. 111).
[0322] AAV3: 138; 262-272; 449-459; 585-593; and in particular embodiment, between 452-453 (SEQ ID NO. 112).
[0323] AAV4: 137; 256-262; 443-453; 583-591; and in particular embodiment, between 446-447 (SEQ ID NO. 113).
[0324] AAV5: 137; 252-262; 442-445; 574-582; and in particular embodiment, between 445-446 (SEQ ID NO. 114).
[0325] AAV6: 138; 262-272; 450-459; 585-593; and in particular embodiment, between 452-453 (SEQ ID NO. 115).
[0326] AAV7: 138; 263-273; 451-461; 586-594; and in particular embodiment, between 453-454 (SEQ ID NO. 116).
[0327] AAV8: 138; 263-274; 451-461; 587-595; and in particular embodiment, between 453-454 (SEQ ID NO. 117).
[0328] AAV9: 138; 262-273; 452-461; 585-593; and in particular embodiment, between 454-455 (SEQ ID NO. 118).
[0329] AAV9e: 138; 262-273; 452-461; 585-593; and in particular embodiment, between 454-455 (SEQ ID NO. 119).
[0330] AAVrh10: 138; 263-274; 452-461; 587-595; and in particular embodiment, between 454-455 (SEQ ID NO. 120).
[0331] AAVrh20: 138; 263-274; 452-461; 587-595; and in particular embodiment, between 454-455 (SEQ ID NO. 121).
[0332] AAVrh39: 138; 263-274; 452-461; 587-595; and in particular embodiment, between 454-455 (SEQ ID NO. 124).
[0333] AAVrh74: 138; 263-274; 452-461; 587-595; and in particular embodiment, between 454-455 (SEQ ID NO. 123 or SEQ ID NO: 154).
[0334] AAVhu.37: 138; 263-274; 452-461; 587-595; and in particular embodiment, between 454-455 (SEQ ID NO. 122)

[0335] In particular embodiments, the peptide insertion occurs between amino acid residues 588-589 of the AAV9 capsid, or between corresponding residues of another AAV type capsid as determined by an amino acid sequence alignment (for example, as in FIG. 8). In particular embodiments, the peptide insertion occurs immediately after amino acid residue I451 to L461, S268 and Q588 of the AAV9 capsid sequence, or immediately after corresponding residues of another AAV capsid sequence (FIG. 8).

[0336] In some embodiments, one or more peptide insertions from one or more homing domains can be used in a single system. In some embodiments, the capsid is chosen and/or further modified to reduce recognition of the AAV particles by the subject's immune system, such as avoiding pre-existing antibodies in the subject. In some embodiments. In some embodiments, the capsid is chosen and/or further modified to enhance desired tropism/targeting.

### 5.2.10 Modified Capsids

[0337] In some embodiments, AAV capsids were modified by introducing selected single to multiple amino acid substitutions which increase effective gene delivery to the CNS, detarget the liver, and/or reduce immune responses of neutralizing antibodies.

[0338] Effective gene delivery to the CNS by intravenously administered rAAV vectors requires crossing the blood brain barrier. Key clusters of residues on the AAVrh.10 capsid that enabled transport across the brain vasculature and widespread neuronal transduction in mice have recently been reported. Specifically, AAVrh.10-derived amino acids N262, G263, T264, S265, G267, S268, T269, and T273 were identified as key residues that promote crossing the BBB (Albright et al, 2018, Mapping the Structural Determinants Required for AAVrh.10 Transport across the Blood-Brain Barrier). Amino acid substitutions in capsids, such as AAV8 and AAV9 capsids that promote rAAV crossing of the blood brain barrier, transduction, detargeting of the liver and/or reduction in immune responses have been identified.

[0339] In some embodiments, provided are capsids having one or more amino acid substitutions that promote transduction and/or tissue tropism of the rAAV having the modified capsid. In particular embodiments, provided are capsids having a single mutation at amino acid 269 of the AAV8 capsid replacing alanine with serine (A269S) (see, Table 7, herein referred to as AAV8.BBB) and amino acid substitutions at corresponding positions in other AAV types. In some embodiments, provided are capsids having multiple substitutions at amino acids 263, 269, and 273 of the AAV9 capsid resulting in the following substitutions: S263G, S269T, and A273T (herein referred to as AAV9.BBB) or substitutions corresponding to these positions in other AAV types.

[0340] Exposure to the AAV capsid can generate an immune response of neutralizing antibodies. One approach to overcome this response is to map the AAV-specific neutralizing epitopes and rationally design an AAV capsid able to evade neutralization. A monoclonal antibody, specific for intact AAV9 capsids, with high neutralizing titer has recently been described (Giles et al, 2018, Mapping an Adeno-associated Virus 9-Specific Neutralizing Epitope To Develop Next-Generation Gene Delivery Vectors). The epitope was mapped to the 3-fold axis of symmetry on the capsid, specifically to residues 496-NNN-498 and 588-QAQAQT-592 (SEQ ID NO: 58). Capsid mutagenesis demonstrated that single amino acid substitution within this epitope markedly reduced binding and neutralization. In addition, in vivo studies showed that mutations in the epitope conferred a “liver-detargeting” phenotype to the mutant vectors, suggesting that the same residues are also responsible for AAV9 tropism. Liver detargeting has also been associated with substitution of amino acid 503 replacing tryptophan with arginine. Presence of the W503R mutation in the AAV9 capsid was associated with low glycan binding avidity (Shen et al, 2012, Glycan Binding Avidity Determines the Systemic Fate of Adeno-Associated Virus Type 9).

[0341] In some embodiments, provided are capsids in which the AAV8.BBB and AAV9.BBB capsids were further modified by substituting asparagines at amino acid positions 498, 499, and 500 (herein referred to as AAV8.BBB.LD) or 496, 497, and 498 (herein referred to as AAV9.BBB.LD) with alanines. In some embodiments, the AAVrh10 capsid was modified by substituting three asparagines at amino acid positions 498, 499, and 500 to alanines (AAVrh10.LD) (Table 7).

[0342] In some embodiments, provided are capsids having three asparagines at amino acid positions 496, 497, and 498 of the AAV9 capsid replaced with alanines and also tryptophan at amino acid 503 of the AAV9 capsid with arginine or capsids with substitutions corresponding to these positions in other AAV types. In some embodiments, provided are capsids having glutamine at amino acid position 474 of the AAV9 capsid substituted with alanine or capsids with substitutions corresponding to this position in other AAV types.

[0343] In some embodiments, the rAAVs described herein increase tissue-specific (such as, but not limited to, CNS) cell transduction in a subject (a human, non-human-primate, or mouse subject) or in cell culture, compared to the rAAV not comprising the peptide insertion. In some embodiments, the increase in tissue specific cell transduction is at least 2, 10, 20, 30, 40, 50, 60, 70, 80, 90, or 100 fold more than that without the peptide insertion. For example, in some embodiments, there is a 50-80 fold increase in tissue specific cell transduction compared to transduction with the same AAV type without a peptide insert. The increase in transduction may be assessed using methods described in the Examples herein and known in the art.

[0344] In some embodiments, the rAAVs described herein increase the incorporation of rAAV genomes into a cell or tissue type in a subject (a human, non-human primate or mouse subject) or in cell culture to the rAAV not comprising the peptide insertion. In some embodiments, the increase in genome integration is at least 2, 10, 20, 30, 40, 50, 60, 70, 80, 90, or 100 fold more than an AAV having a capsid without the peptide insertion. For example, in some embodiments, there is a 50-80 fold increase in genome integration compared to genome integration with the same AAV type without a peptide insert.

### 5.3. Methods of Making rAAV Molecules

[0345] Another aspect of the present invention involves making molecules disclosed herein. In some embodiments, a molecule according to the invention is made by providing a nucleotide comprising the nucleic acid sequence encoding any of the capsid protein molecules herein; and using a packaging cell system to prepare corresponding rAAV particles with capsid coats made up of the capsid protein. In some embodiments, the nucleic acid sequence encodes a sequence having at least 60%, 70%, 80%, 85%, 90%, 91%, 92%, 93%, 94%, 95%, 96%, 97%, 98%, 99% or 99.9%, identity to the sequence of a capsid protein molecule described herein, and retains (or substantially retains) biological function of the capsid protein and the inserted peptide from a heterologous protein or domain thereof. In some embodiments, the nucleic acid encodes a sequence having at least 60%, 70%, 80%, 85%, 90%, 91%, 92%, 93%, 94%, 95%, 96%, 97%, 98%, 99% or 99.9%, identity to the sequence of the AAV9 capsid protein (SEQ ID NO:118 and see FIG. 8), while retaining (or substantially retaining) biological function of the AAV9 capsid protein and the inserted peptide.

[0346] The capsid protein, coat, and rAAV particles may be produced by techniques known in the art. In some embodiments, the viral genome comprises at least one inverted terminal repeat to allow packaging into a vector. In some embodiments, the viral genome further comprises a cap gene and/or a rep gene for expression and splicing of the cap gene. In other embodiments, the cap and rep genes are provided by a packaging cell and not present in the viral genome.

[0347] In some embodiments, the nucleic acid encoding the engineered capsid protein is cloned into an AAV Rep-Cap helper plasmid in place of the existing capsid gene. When introduced together into host cells, this plasmid helps package an rAAV genome into the engineered capsid protein as the capsid coat. Packaging cells can be any cell type possessing the genes necessary to promote AAV genome replication, capsid assembly, and packaging. Nonlimiting examples include 293 cells or derivatives thereof, HELA cells, or insect cells.

[0348] Standard techniques can be used for recombinant DNA, oligonucleotide synthesis, and tissue culture and transformation (e.g., electroporation, lipofection). Enzymatic reactions and purification techniques can be performed according to manufacturer's specifications or as commonly accomplished in the art or as described herein. The foregoing techniques and procedures can be generally performed according to conventional methods well known in the art and as described in various general and more specific references that are cited and discussed throughout the present specification. See, e.g., Sambrook et al., Molecular Cloning: A Laboratory Manual (2d ed., Cold Spring Harbor Laboratory Press, Cold Spring Harbor, N.Y. (1989)), which is incorporated herein by reference for any purpose. Unless specific definitions are provided, the nomenclatures utilized in connection with, and the laboratory procedures and techniques of, analytical chemistry, synthetic organic chemistry, and medicinal and pharmaceutical chemistry described herein are those well-known and commonly used in the art. Standard techniques can be used for chemical syntheses, chemical analyses, pharmaceutical preparation, formulation, and delivery, and treatment of patients. Nucleic acid sequences of AAV-based viral vectors, and methods of making recombinant AAV and AAV capsids, are taught, e.g., in U.S. Pat. Nos. 7,282,199; 7,790,449; 8,318,480; 8,962,332; and PCT/EP2014/076466, each of which is incorporated herein by reference in its entirety.

[0349] In some embodiments, the rAAVs provide transgene delivery vectors that can be used in therapeutic and prophylactic applications, as discussed in more detail below. In some embodiments, the rAAV vector also includes regulatory control elements known to one skilled in the art to influence the expression of the RNA and/or protein products encoded by nucleic acids (transgenes) within target cells of the subject. Regulatory control elements and may be tissue-specific, that is, active (or substantially more active or significantly more active) only in the target cell/tissue. In specific embodiments, the AAV vector comprises a regulatory sequence, such as a promoter, operably linked to the transgene that allows for expression in target tissues. The promoter may be a constitutive promoter, for example, the CB7 promoter. Additional promoters include: cytomegalovirus (CMV) promoter, Rous sarcoma virus (RSV) promoter, MMT promoter, EF-1 alpha promoter, UB6 promoter, chicken beta-actin promoter, CAG promoter, RPE65 promoter, opsin promoter, the TBG (Thyroxine-binding Globulin) promoter, the APOA2 promoter, SERPINA1 (hAAT) promoter, or MIR122 promoter. In some embodiments, particularly where it may be desirable to turn off transgene expression, an inducible promoter is used, e.g., hypoxia-inducible or rapamycin-inducible promoter.

[0350] Provided in particular embodiments are AAV9 vectors comprising a viral genome comprising an expression cassette for expression of the transgene, under the control of regulatory elements, and flanked by ITRs and an engineered viral capsid as described herein or is at least 95%, 96%, 97%, 98%, 99% or 99.9% identical to the amino acid sequence of the AAV9 capsid protein (see FIG. 8), while retaining the biological function of the engineered AAV9 capsid. In certain embodiments, the encoded AAV9 capsid has the sequence of wild type AAV9, with the peptide insertion as described herein, with, in addition, 1, 2, 3, 4, 5, 6, 7, 8, 9, 10, 11, 12, 13, 14, 15, 16, 17, 18, 19, 20, 21, 22, 23, 24, 25, 26, 27, 28, 29, or 30 amino acid substitutions with respect to the wild type AAV sequence and retains biological function of the AAV9 capsid. Also provided are engineered AAV vectors other than AAV9 vectors, such as engineered AAV1, AAV2, AAV3, AAV4, AAV5, AAV6, AAV7, AAV8, AAV9, AAV9e, AAVrh10, AAVrh20, AAVhu.37, AAVrh39, or AAVrh74 vectors, with the peptide insert as described herein and 1, 2, 3, 4, 5, 6, 7, 8, 9, 10, 11, 12, 13, 14, 15, 16, 17, 18, 19, 20, 21, 22, 23, 24, 25, 26, 27, 28, 29, or 30 amino acid substitutions relative to the wild type or unengineered sequence for that AAV type and that retains its biological function.

[0351] The recombinant adenovirus can be a first-generation vector, with an E1 deletion, with or without an E3 deletion, and with the expression cassette inserted into either deleted region. The recombinant adenovirus can be a second-generation vector, which contains full or partial deletions of the E2 and E4 regions. A helper-dependent adenovirus retains only the adenovirus inverted terminal repeats and the packaging signal (phi). The transgene generally is inserted between the packaging signal and the 3′ITR, with or without stuffer sequences to keep the genome close to wild-type size of approximately 36 kb. An exemplary protocol for production of adenoviral vectors may be found in Alba et al., 2005, “Gutless adenovirus: last generation adenovirus for gene therapy,” e Therapy 12:S18-S27, which is incorporated by reference herein in its entirety

[0352] The rAAV vector for delivering the transgene to target tissues, cells, or organs, has a tropism for that particular target tissue, cell, or organ. Tissue-specific promoters may also be used. The construct further can include expression control elements that enhance expression of the transgene driven by the vector (e.g., introns such as the chicken (3-actin intron, minute virus of mice (MVM) intron, human factor IX intron (e.g., FIX truncated intron 1), β-globin splice donor/immunoglobulin heavy chain spice acceptor intron, adenovirus splice donor/immunoglobulin splice acceptor intron, SV40 late splice donor/splice acceptor (19S/16S) intron, and hybrid adenovirus splice donor/IgG splice acceptor intron and polyA signals such as the rabbit β-globin polyA signal, human growth hormone (hGH) polyA signal, SV40 late polyA signal, synthetic polyA (SPA) signal, and bovine growth hormone (bGH) polyA signal. See, e.g., Powell and Rivera-Soto, 2015, Discov. Med., 19(102):49-57.

[0353] In certain embodiments, nucleic acids sequences disclosed herein may be codon-optimized, for example, via any codon-optimization technique known to one of skill in the art (see, e.g., review by Quax et al., 2015, Mol Cell 59:149-161).

[0354] In a specific embodiment, the constructs described herein comprise the following components: (1) AAV9 inverted terminal repeats that flank the expression cassette; (2) control elements, which include a) the CB7 promoter, comprising the CMV enhancer/chicken (3-actin promoter, b) a chicken β-actin intron and c) a rabbit β-globin poly A signal; and (3) transgene providing (e.g., coding for) a nucleic acid or protein product of interest. In a specific embodiment, the constructs described herein comprise the following components: (1) AAV9 inverted terminal repeats that flank the expression cassette; (2) control elements, which include a) a hypoxia-inducible promoter, b) a chicken β-actin intron and c) a rabbitβ-globin poly A signal; and (3) transgene providing (e.g., coding for) a nucleic acid or protein product of interest.

[0355] The viral vectors provided herein may be manufactured using host cells, e.g., mammalian host cells, including host cells from humans, monkeys, mice, rats, rabbits, or hamsters. Nonlimiting examples include: A549, WEHI, 10T1/2, BHK, MDCK, COS1, COS7, BSC 1, BSC 40, BMT 10, VERO, W138, HeLa, 293, Saos, C2C12, L, HT1080, HepG2, primary fibroblast, hepatocyte, and myoblast cells. Typically, the host cells are stably transformed with the sequences encoding the transgene and associated elements (i.e., the vector genome), and genetic components for producing viruses in the host cells, such as the replication and capsid genes (e.g., the rep and cap genes of AAV). For a method of producing recombinant AAV vectors with AAV8 capsids, see Section IV of the Detailed Description of U.S. Pat. No. 7,282,199 B2, which is incorporated herein by reference in its entirety. Genome copy titers of said vectors may be determined, for example, by TAQMAN® analysis. Virions may be recovered, for example, by CsCl2 sedimentation. Alternatively, baculovirus expression systems in insect cells may be used to produce AAV vectors. For a review, see Aponte-Ubillus et al., 2018, Appl. Microbiol. Biotechnol. 102:1045-1054, which is incorporated by reference herein in its entirety for manufacturing techniques.

[0356] In vitro assays, e.g., cell culture assays, can be used to measure transgene expression from a vector described herein, thus indicating, e.g., potency of the vector. For example, the PER.C6® Cell Line (Lonza), a cell line derived from human embryonic retinal cells, or retinal pigment epithelial cells, e.g., the retinal pigment epithelial cell line hTERT RPE-1 (available from ATCC®), can be used to assess transgene expression. Alternatively, cell lines derived from liver or other cell types may be used, for example, but not limited, to HuH-7, HEK293, fibrosarcoma HT-1080, HKB-11, and CAP cells. Once expressed, characteristics of the expressed product (i.e., transgene product) can be determined, including determination of the glycosylation and tyrosine sulfation patterns, using assays known in the art.

### 5.4. Therapeutic and Prophylactic Uses

[0357] Another aspect relates to therapies which involve administering a transgene via a rAAV vector according to the invention to a subject in need thereof, for delaying, preventing, treating, and/or managing a disease or disorder, and/or ameliorating one or more symptoms associated therewith. A subject in need thereof includes a subject suffering from the disease or disorder, or a subject pre-disposed thereto, e.g., a subject at risk of developing or having a recurrence of the disease or disorder. Generally, a rAAV carrying a particular transgene will find use with respect to a given disease or disorder in a subject where the subject's native gene, corresponding to the transgene, is defective in providing the correct gene product, or correct amounts of the gene product. The transgene then can provide a copy of a gene that is defective in the subject.

[0358] Generally, the transgene comprises cDNA that restores protein function to a subject having a genetic mutation(s) in the corresponding native gene. In some embodiments, the cDNA comprises associated RNA for performing genomic engineering, such as genome editing via homologous recombination. In some embodiments, the transgene encodes a therapeutic RNA, such as a shRNA, artificial miRNA, or element that influences splicing.

[0359] Tables 3A-3B below provides a list of transgenes that may be used in any of the rAAV vectors described herein, in particular, in the novel insertion sites described herein, to treat or prevent the disease with which the transgene is associated, also listed in Tables 3A-3B. As described herein, the AAV vector may be engineered as described herein to target the appropriate tissue for delivery of the transgene to effect the therapeutic or prophylactic use. The appropriate AAV serotype may be chosen to engineer to optimize the tissue tropism and transduction of the vector.

TABLE 3A

| | | Possible |
|---|---|---|
| | | AAV |
| | | serotype for |
| | | delivery of |
| Disease | Transgene | transgene |
| MPS I | alpha-L-iduronidase (IDUA) | AAV9 |
| MPS II (Hunter | iduronate-2-sulfatase (IDS) | AAV9 |
| Syndrome) | | |
| ceroid lipofuscinosis | (CLN1, CLN2, CLN10, CLN13), a soluble | AAV9 |
| (Batten disease) | lysosomal protein (CLN5), a protein in the | |
| | secretory pathway (CLN11), two cytoplasmic | |
| | proteins that also peripherally associate with | |
| | membranes (CLN4, CLN14), and many | |
| | transmembrane proteins with different subcellular | |
| | locations (CLN3, CLN6, CLN7, CLN8, CLN12) | |
| MPS IIIa (Sanfilippo | heparan sulfate sulfatase (also called N- | AAV9, |
| type A Syndrome) | sulfoglucosamine sulfohydrolase (SGSH)) | Rh10 |
| MPS IIIB (Sanfilippo | N-acetyl-alpha-D-glucosaminidase (NAGLU) | AAV9 |
| type B Syndrome) | | |
| MPS VI (Maroteaux- | arylsulfatase B | AAV8 |
| Lamy Syndrome) | | |
| Morquio syndrome | Beta galactosidase or galactosamine-6-sulfatase | AAV9 |
| (MPS IV) | | |
| Gaucher disease | Glucocerebrosidase, GBA1 | AAV9 |
| (type 1, II and III) | | |
| Parkinson's Disease | Glucocerebrosidase; GBA1 | AAV9 |
| Parkinson's Disease | dopamine decarboxylase | AAV2 |
| Pompe | acid maltase; GAA | AAV9 |
| Metachromatic | Aryl sulfatase A | Rh10 |
| leukodystrophy | | |
| MPS VII (Sly | beta-glucuronidase | |
| syndrome) | | |
| MPS VIII | glucosamine-6-sulfate sulfatase | |
| MPS IX | hyaluronidase | |
| Niemann-Pick disease | sphingomyelinase | |
| Niemann-Pick disease | a npc1 gene encoding a | |
| without | cholesterol metabolizing enzyme | |
| sphingomyelinase | | |
| deficiency | | |
| Tay-Sachs disease | Alpha subunit of beta-hexosaminidase | |
| Sandhoff disease | both alpha and beta subunit of beta-hexosaminidase | |
| Fabry Disease | alpha-galactosidase | |
| Fucosidosis | Fucosidase (FUCA1 gene) | |
| Alpha-mannosidosis | alpha-mannosidase | |
| Beta-mannosidosis | Beta-mannosidase | |
| Wolman disease | cholesterol ester hydrolase | |
| Parkinson's disease | Neurturin | |
| Parkinson's disease | glial derived growth factor (GDGF) | |
| Parkinson's disease | tyrosine hydroxylase | |
| Parkinson's disease | glutamic acid decarboxylase. | |
| No disease listed | fibroblast growth factor-2 (FGF-2) | |
| No disease listed | brain derived growth factor (BDGF) | |
| No disease listed | neuraminidase deficiency with betagalactosidase | |
| (Galactosialidosis | deficiency | |
| (Goldberg syndrome)) | | |
| Spinal Muscular | SMN | AAV9 |
| Atrophy (SMA) | | |
| Friedreich's ataxia | Frataxin | AAV9 |
| | | PHP.B |
| Amyotrophic lateral | SOD1 | Rh10 |
| sclerosis (ALS) | | |
| Glycogen Storage | Glucose-6-phosphatase | AAV8 |
| Disease 1a | | |
| XLMTM | MTM1 | AAV8 or |
| | | AAV9 |
| Crigler Najjar | UGT1A1 | AAV8 |
| CPVT | CASQ2 | AAV9 |
| Rett syndrome | MECP2 | AAV9 |
| Achromatopsia | CNGB3, CNGA3, GNAT2, PDE6C | AAV8 |
| Choroidermia | CDM | AAV8 |
| Danon Disease | LAMP2 | AAV9 |

TABLE 3B

| | | Possible |
|---|---|---|
| | | AAV |
| | | serotype for |
| | | delivery of |
| Disease | Transgene | transgene |
| Cystic Fibrosis | CFTR | AAV2 |
| Duchenne Muscular Dystrophy | Mini-Dystrophin Gene | AAV2 |
| Limb Girdle Muscular Dystrophy Type | human-alpha-sarcoglycan | AAV1 |
| 2C\|Gamma-sarcoglycanopathy | | |
| Advanced Heart Failure | SERCA2a | AAV6 |
| Rheumatoid Arthritis | TNFR:Fc Fusion Gene | AAV2 |
| Leber Congenital Amaurosis | GAA | AAV1 |
| Limb Girdle Muscular Dystrophy Type | gamma-sarcoglycan | AAV1 |
| 2C\|Gamma-sarcoglycanopathy | | |
| Retinitis Pigmentosa | hMERTK | AAV2 |
| Age-Related Macular Degeneration | sFLT01 | AAV2 |
| Becker Muscular Dystrophy and | huFollistatin344 | AAV1 |
| Sporadic Inclusion Body Myositis | | |
| Parkinson's Disease | GDNF | AAV2 |
| Metachromatic Leukodystrophy (MLD) | cuARSA | AAVrh.10 |
| Hepatitis C | anti-HCV shRNA | AAV8 |
| Limb Girdle Muscular Dystrophy | hSGCA | AAVrh74* |
| Type 2D | | |
| Human Immunodeficiency Virus | PG9DP | AAV1 |
| Infections; HIV Infections (HIV-1) | | |
| Acute Intermittant Porphyria | PBGD | AAV5 |
| Leber's Hereditary Optical Neuropathy | P1ND4v2 | AAV2 |
| Alpha-1 Antitrypsin Deficiency | alpha1AT | AAVrh10 |
| Pompe Disease | hGAA | AAV9 |
| X-linked Retinoschisis | RS1 | AAV8 |
| Choroideremia | hCHM | AAV2 |
| Giant Axonal Neuropathy | JeT-GAN | AAV9 |
| Duchenne Muscular Dystrophy | rmicro-Dystrophin | AAVrh74* |
| X-linked Retinoschisis | hRS1 | AAV2 |
| Squamous Cell Head and Neck Cancer; | hAQP1 | AAV2 |
| Radiation Induced Xerostomia | | |
| Hemophilia B | Factor IX | AAVrh10/ |
| | | Rh74 |
| Homozygous FH | hLDLR | AAV8 |
| Dysferlinopathies | rAAVrh74.MHCK7.DYSF.DV | AAVrh74 |
| Hemophilia B | AAV6 ZFP nuclease | AAV6 |
| MPS I | AAV6 ZFP nuclease | AAV6 |
| Rheumatoid Arthritis | NF-kB.IFN-β | AAV5 |
| Batten/CLN6 | CLN6 | AAV9 |
| Sanfilippo Disease Type A | hSGSH | AAV9 |
| Osteoarthritis | 51L-1Ra | AAV2.5 |
| Achromatopsia | CNGA3 | AAV2tYF |
| Achromatopsia | CNGB3 | AAV8 |
| Ornithine Transcarbamylase (OTC) | OTC | scAAV8 |
| Deficiency | | |
| Hemophilia A | Factor VIII | LK03/AAV3B |
| Mucopolysaccharidosis II | ZFP nuclease | AAV6 |
| Hemophilia A | ZFP nuclease | AAV6 |
| Wet AMD | anti-VEGF | AAV8 |
| X-Linked Retinitis Pigmentosa | PGR | AAV2 |
| Mucopolysaccharidosis Type VI | hARSB | AAV8 |
| Leber Hereditary Optic Neuropathy | ND4 | AAV2 |
| X-Linked Myotubular Myopathy | MTM1 | AAV8 |
| Crigler-Najjar Syndrome | UGT1A1 | AAV8 |
| Achromatopsia | CNGB3 | AAV8 |
| Retinitis Pigmentosa | hPDE6B | AAV5 |
| X-Linked Retinitis Pigmentosa | RPGR | AAV2tYF |
| Mucopolysaccharidosis Type 3 B | hNAGLU | AAV9 |
| Duchenne Muscular Dystrophy | GALGT2 | AAVrh74 |
| Arthritis, Rheumatoid; Arthritis, | TNFR:Fc Fusion Gene | AAV2 |
| Psoriatic; Ankylosing Spondylitis | | |
| Idiopathic Parkinson's Disease | Neurturin | AAV2 |
| Alzheimer's Disease | NGF | AAV2 |
| Human Immunodeficiency Virus | tgAAC09 | AAV2 |
| Infections; HIV Infections (HIV-1) | | |
| Familial Lipoprotein Lipase Deficiency | LPL | AAV1 |
| Idiopathic Parkinson's Disease | Neurturin | AAV2 |
| Alpha-1 Antitrypsin Deficiency | hAAT | AAV1 |
| Leber Congenital Amaurosis (LCA) 2 | hRPE65v2 | AAV2 |
| Batten Disease; Late Infantile | CLN2 | AAVrh.10 |
| Neuronal Lipofuscinosis | | |
| Parkinson's Disease | GAD | AAV2 |
| Sanfilippo Disease Type A/ | N-sulfoglucosamine | AAVrh.10 |
| Mucopolysaccharidosis Type IIIA | sulfohydrolase (SGSH) gene | |
| Congestive Heart Failure | SERC2a | AAV1 |
| Becker Muscular Dystrophy and | rAAV1.CMV.huFollistatin344 | AAV1 |
| Sporadic Inclusion Body Myositis | | |
| Parkinson's Disease | hAADC-2 | AAV2 |
| Choroideremia | REP1 | AAV2 |
| CEA Specific AAV-DC-CTL | CEA | AAV2 |
| Treatment in Stage IV Gastric Cancer | | |
| Gastric Cancer | MUC1-peptide-DC-CTL | |
| Leber's Hereditary Optical Neuropathy | scAAV2-P1ND4v2 | scAAV2 |
| Aromatic Amino Acid Decarboxylase | hAADC | AAV2 |
| Deficiency | | |
| Hemophilia B | Factor IX | AAVrh10 |
| Parkinson's Disease | AADC | AAV2 |
| Leber Hereditary Optic Neuropathy | Genetic: GS010\|Drug: Placebo | AAV2 |
| SMA-Spinal Muscular Atrophy\|Gene | SMN | AAV9 |
| Therapy | | |
| Hemophilia A | B-Domain Deleted Factor VIII | AAV8 |
| MPSI | IDUA | AAV9 |
| MPS II | IDS | AAV9 |
| CLN3-Related Neuronal Ceroid- | CLN3 | AAV9 |
| Lipofuscinosis (Batten) | | |
| Limb-Girdle Muscular Dystrophy, | hSGCB | rh74 |
| Type 2E | | |
| Alzheimer Disease | APOE2 | rh10 |
| Retinitis Pigmentosa | hMERKTK | AAV2 |
| Retinitis Pigmentosa | RLBP 1 | AAV8 |
| Wet AMD | Anti-VEGF antibody | AAV2.7m8 |

[0360] For example, a rAAV vector comprising a transgene encoding glial derived growth factor (GDGF) finds use treating/preventing/managing Parkinson's disease. Generally, the rAAV vector is administered systemically. For example, the rAAV vector may be provided by intravenous, intrathecal, intra-nasal, and/or intra-peritoneal administration.

[0361] In particular aspects, the rAAVs of the present invention find use in delivery to target tissues, or target cell types, including cell matrix associated with the target cell types, associated with the disorder or disease to be treated/prevented. A disease or disorder associated with a particular tissue or cell type is one that largely affects the particular tissue or cell type, in comparison to other tissue of cell types of the body, or one where the effects or symptoms of the disorder appear in the particular tissue or cell type. Methods of delivering a transgene to a target tissue of a subject in need thereof involve administering to the subject tan rAAV where the peptide insertion is a homing peptide. In the case of Parkinson's, for example, a rAAV vector comprising a peptide insertion that directs the rAAV to neural tissue can be used, in particular, where the peptide insertion facilitates the rAAV in crossing the blood brain barrier to the CNS. Such peptide insertions include those derived from a neural tissue-homing domains, such as the “EPO peptide” or “HAD peptide” described herein.

[0362] For example, capsid proteins comprising an EPO peptide can find use in re-targeting AAVs to the CNS, crossing the blood-brain barrier. Capsid proteins comprising an EPO peptide further can have a protective effect on CNS tissues, e.g., where the EPO insertion binds the Innate Repair Receptor, activating the IRR biological switch, and suppressing inflammation and/or initiating CNS repair. In some embodiments, rAAVs comprising an EPO peptide of the present invention find use in one of more of the following disorders: organ ischemic injury, stroke, myocardial infarction, kidney injury, renal disease, brain injury, renal ischemia, limb ischemia, autoimmune encephalomyelitis, autoimmune neuritis, multiple sclerosis, Guillain-Barre Syndrome, neuropathic pain, diabetes mellitus complications, such as diabetic retinopathy and diabetic autonomic neuropathy, and sarcoidosis.

[0363] For a disease or disorder associated with neural tissue, an rAAV vector can be used that comprises a peptide insertion from a neural tissue-homing domain, such as any described herein. Diseases/disorders associated with neural tissue include Alzheimer's disease, amyotrophic lateral sclerosis (ALS), amyotrophic lateral sclerosis (ALS), Battens disease, Batten's Juvenile NCL form, Canavan disease, chronic pain, Friedreich's ataxia, glioblastoma multiforme, Huntington's disease, Late Infantile neuronal ceroid lipofuscinosis (LINCL), lysosomal storage disorders, Leber's congenital amaurosis, multiple sclerosis, Parkinson's disease, Pompe disease, Rett syndrome, spinal cord injury, spinal muscular atrophy (SMA), stroke, and traumatic brain injury. The vector further can contain a transgene for therapeutic/prophylactic benefit to a subject suffering from, or at risk of developing, the disease or disorder (see Tables 3A-3B).

[0364] For a disease or disorder associated with bone, an rAAV vector can be used that comprises a peptide insertion from a bone-homing domain, such as described herein.

[0365] For a disease or disorder associated with the kidneys, an rAAV vector can be used that comprises a peptide insertion from a kidney-homing domain, such as described herein.

[0366] For a disease or disorder associated with muscle, an rAAV vector can be used that comprises a peptide insertion from a muscle-homing domain, such as described herein.

[0367] For a disease or disorder associated with endothelial cells, an rAAV vector can be used that comprises a peptide insertion from an endothelial cell-homing domain, such as described herein.

[0368] For a disease or disorder associated with integrin receptors or cells expressing a particular integrin receptor, an rAAV vector can be used that comprises a peptide insertion from an integrin receptor-binding domain, such as described herein.

[0369] For a disease or disorder associated with transferrin receptors or cells expressing a transferrin receptor, such as tumors highly expressing transferrin receptors, an rAAV vector can be used that comprises a peptide insertion from an transferrin receptor-binding domain, such as described herein.

[0370] For a disease or disorder associated with tumors, an rAAV vector can be used that comprises a peptide insertion from said tumor cell-targeting domain.

[0371] For a disease or disorder associated with the retina or eye, an rAAV vector can be used that comprises a peptide insertion from said retinal cell-homing domain, including an HAD peptide. The peptide insertion increases retinal tropism, directing the rAAV to target the eye or retina of the subject, crossing the blood-eye barrier. The term “retinal cell” refers to one or more of the cell types found in or near the retina, including amacrine cells, bipolar cells, horizontal cells, Muller glial cells, photoreceptor cells (e.g., rods and cones), retinal ganglion cells (e.g., midget cells, parasol cells, bistratified cells, giant retina ganglion cells, and photosensitive ganglion cells), retinal pigmented epithelium, endothelial cells of the inner limiting membrane, and the like.

[0372] Generally, where the rAAV vector comprises a peptide insertion for retinal cell-homing, the vector is administered by in vivo injection, such as injection directly into the eye. For example, the rAAV comprising a peptide insertion for increasing retinal tropism may be injected intravitreally. In some embodiments, the rAAV for increasing retinal tropism is administered by intraocular injection, e.g., through the pars plana into the vitreous body or aqueous humor of the eye. In some embodiments, the rAAV for increasing retinal tropism is administered peribulbar injection or subconjunctival injection. One advantage of rAAV vectors with peptide insertion for retinal cell-homing, is that the subject may avoid surgery, e.g., avoiding surgery to implant the therapeutic instead delivered by injection. In certain embodiments, the therapeutic is delivered by a rAAV vector described herein by intravitreal injection, to provide a therapeutically effective amount for treating a disease or disorder associated with the eye, particularly, a disease or disorder associated with the retina of the subject. In more embodiments, treatment is achieved following a single intravitreal injection, not more than two intravitreal injections, not more than three intravitreal injections, not more than four intravitreal injections, not more than five intravitreal injections, or not more than six intravitreal injections.

[0373] Diseases/disorders associated with the eye or retina are referred to as “ocular diseases.” Nonlimiting examples of ocular diseases include anterior ischemic optic neuropathy; acute macular neuroretinopathy; Bardet-Biedl syndrome; Behcet's disease; branch retinal vein occlusion; central retinal vein occlusion; choroideremia; choroidal neovascularization; chorioretinal degeneration; cone-rod dystrophy; color vision disorders (e.g., achromatopsia, protanopia, deuteranopia, and tritanopia); congenital stationary night blindness; diabetic uveitis; epiretinal membrane disorders; inherited macular degeneration; histoplasmosis; macular degeneration (e.g., acute macular degeneration, non-exudative age related macular degeneration, exudative age related macular degeneration); diabetic retinopathy; edema (e.g., macular edema, cystoid macular edema, diabetic macular edema); glaucoma; Leber congenital amaurosis; Leber's hereditary optic neuropathy; macular telangiectasia; multifocal choroiditis; non-retinopathy diabetic retinal dysfunction; ocular trauma; ocular tumors; proliferative vitreoretinopathy (PVR); retinopathy of prematurity; retinoschisis; retinitis pigmentosa; retinal arterial occlusive disease, retinal detachment, Stargardt disease (fundus flavimaculatus); sympathetic opthalmia; uveal diffusion; uveitic retinal disease; Usher syndrome; Vogt Koyanagi-Harada (VKH) syndrome; or a posterior ocular condition associated with ocular laser or photodynamic therapy.

[0374] The rAAV vectors of the invention also can facilitate delivery, in particular, targeted delivery, of oligonucleotides, drugs, imaging agents, inorganic nanoparticles, liposomes, antibodies to target cells or tissues. The rAAV vectors also can facilitate delivery, in particular, targeted delivery, of non-coding DNA, RNA, or oligonucleotides to target tissues.

[0375] The agents may be provided as pharmaceutically acceptable compositions as known in the art and/or as described herein. Also, the rAAV molecule of the invention may be administered alone or in combination with other prophylactic and/or therapeutic agents.

[0376] The dosage amounts and frequencies of administration provided herein are encompassed by the terms therapeutically effective and prophylactically effective. The dosage and frequency will typically vary according to factors specific for each patient depending on the specific therapeutic or prophylactic agents administered, the severity and type of disease, the route of administration, as well as age, body weight, response, and the past medical history of the patient, and should be decided according to the judgment of the practitioner and each patient's circumstances. Suitable regimens can be selected by one skilled in the art by considering such factors and by following, for example, dosages reported in the literature and recommended in the Physician's Desk Reference (56^{th} ed., 2002). Prophylactic and/or therapeutic agents can be administered repeatedly. Several aspects of the procedure may vary such as the temporal regimen of administering the prophylactic or therapeutic agents, and whether such agents are administered separately or as an admixture.

[0377] The amount of an agent of the invention that will be effective can be determined by standard clinical techniques. Effective doses may be extrapolated from dose-response curves derived from in vitro or animal model test systems. For any agent used in the method of the invention, the therapeutically effective dose can be estimated initially from cell culture assays. A dose may be formulated in animal models to achieve a circulating plasma concentration range that includes the IC₅₀ (i.e., the concentration of the test compound that achieves a half-maximal inhibition of symptoms) as determined in cell culture. Such information can be used to more accurately determine useful doses in humans. Levels in plasma may be measured, for example, by high performance liquid chromatography.

[0378] Prophylactic and/or therapeutic agents, as well as combinations thereof, can be tested in suitable animal model systems prior to use in humans. Such animal model systems include, but are not limited to, rats, mice, chicken, cows, monkeys, pigs, dogs, rabbits, etc. Any animal system well-known in the art may be used. Such model systems are widely used and well known to the skilled artisan. In some embodiments, animal model systems for a CNS condition are used that are based on rats, mice, or other small mammal other than a primate.

[0379] Once the prophylactic and/or therapeutic agents of the invention have been tested in an animal model, they can be tested in clinical trials to establish their efficacy. Establishing clinical trials will be done in accordance with common methodologies known to one skilled in the art, and the optimal dosages and routes of administration as well as toxicity profiles of agents of the invention can be established. For example, a clinical trial can be designed to test a rAAV molecule of the invention for efficacy and toxicity in human patients.

[0380] Toxicity and efficacy of the prophylactic and/or therapeutic agents of the instant invention can be determined by standard pharmaceutical procedures in cell cultures or experimental animals, e.g., for determining the LD₅₀ (the dose lethal to 50% of the population) and the ED₅₀ (the dose therapeutically effective in 50% of the population). The dose ratio between toxic and therapeutic effects is the therapeutic index and it can be expressed as the ratio LD₅₀/ED₅₀. Prophylactic and/or therapeutic agents that exhibit large therapeutic indices are preferred. While prophylactic and/or therapeutic agents that exhibit toxic side effects may be used, care should be taken to design a delivery system that targets such agents to the site of affected tissue in order to minimize potential damage to uninfected cells and, thereby, reduce side effects.

[0381] A rAAV molecule of the invention generally will be administered for a time and in an amount effective for obtain a desired therapeutic and/or prophylactic benefit. The data obtained from the cell culture assays and animal studies can be used in formulating a range and/or schedule for dosage of the prophylactic and/or therapeutic agents for use in humans. The dosage of such agents lies within a range of circulating concentrations that include the ED₅₀ with little or no toxicity. The dosage may vary within this range depending upon the dosage form employed and the route of administration utilized.

[0382] A therapeutically effective dosage of an rAAV vector for patients is generally from about 0.1 ml to about 100 ml of solution containing concentrations of from about 1×10⁹ to about 1×10¹⁶ genomes rAAV vector, or about 1×10¹⁰ to about 1×10¹⁵, about 1×10¹² to about 1×10¹⁶, or about 1×10¹⁴ to about 1×10¹⁶ AAV genomes. Levels of expression of the transgene can be monitored to determine/adjust dosage amounts, frequency, scheduling, and the like.

[0383] Treatment of a subject with a therapeutically or prophylactically effective amount of the agents of the invention can include a single treatment or can include a series of treatments. For example, pharmaceutical compositions comprising an agent of the invention may be administered once a day, twice a day, or three times a day. In some embodiments, the agent may be administered once a day, every other day, once a week, twice a week, once every two weeks, once a month, once every six weeks, once every two months, twice a year, or once per year. It will also be appreciated that the effective dosage of certain agents, e.g., the effective dosage of agents comprising a dual antigen-binding molecule of the invention, may increase or decrease over the course of treatment.

[0384] In some embodiments, ongoing treatment is indicated, e.g., on a long-term basis, such as in the ongoing treatment and/or management of chronic diseases or disorders. For example, in particular embodiments, an agent of the invention is administered over a period of time, e.g., for at least 6 months, at least one year, at least two years, at least five years, at least ten years, at least fifteen years, at least twenty years, or for the rest of the lifetime of a subject in need thereof

[0385] The rAAV molecules of the invention may be administered alone or in combination with other prophylactic and/or therapeutic agents. Each prophylactic or therapeutic agent may be administered at the same time or sequentially in any order at different points in time; however, if not administered at the same time, they should be administered sufficiently close in time so as to provide the desired therapeutic or prophylactic effect. Each therapeutic agent can be administered separately, in any appropriate form and by any suitable route.

[0386] In various embodiments, the different prophylactic and/or therapeutic agents are administered less than 1 hour apart, at about 1 hour apart, at about 1 hour to about 2 hours apart, at about 2 hours to about 3 hours apart, at about 3 hours to about 4 hours apart, at about 4 hours to about 5 hours apart, at about 5 hours to about 6 hours apart, at about 6 hours to about 7 hours apart, at about 7 hours to about 8 hours apart, at about 8 hours to about 9 hours apart, at about 9 hours to about 10 hours apart, at about 10 hours to about 11 hours apart, at about 11 hours to about 12 hours apart, no more than 24 hours apart, or no more than 48 hours apart. In certain embodiments, two or more agents are administered within the same patient visit.

[0387] Methods of administering agents of the invention include, but are not limited to, parenteral administration (e.g., intradermal, intramuscular, intraperitoneal, intravenous, and subcutaneous, including infusion or bolus injection), epidural, and by absorption through epithelial or mucocutaneous or mucosal linings (e.g., intranasal, oral mucosa, rectal, and intestinal mucosa, etc.). In particular embodiments, such as where the transgene is intended to be expressed in the CNS, the vector is administered via lumbar puncture or via cisterna magna.

[0388] In certain embodiments, the agents of the invention are administered intravenously and may be administered together with other biologically active agents.

[0389] In another specific embodiment, agents of the invention may be delivered in a sustained release formulation, e.g., where the formulations provide extended release and thus extended half-life of the administered agent. Controlled release systems suitable for use include, without limitation, diffusion-controlled, solvent-controlled, and chemically-controlled systems. Diffusion controlled systems include, for example reservoir devices, in which the molecules of the invention are enclosed within a device such that release of the molecules is controlled by permeation through a diffusion barrier. Common reservoir devices include, for example, membranes, capsules, microcapsules, liposomes, and hollow fibers. Monolithic (matrix) device are a second type of diffusion controlled system, wherein the dual antigen-binding molecules are dispersed or dissolved in an rate-controlling matrix (e.g., a polymer matrix). Agents of the invention can be homogeneously dispersed throughout a rate-controlling matrix and the rate of release is controlled by diffusion through the matrix. Polymers suitable for use in the monolithic matrix device include naturally occurring polymers, synthetic polymers and synthetically modified natural polymers, as well as polymer derivatives.

[0390] Any technique known to one of skill in the art can be used to produce sustained release formulations comprising one or more agents described herein. See, e.g. U.S. Pat. No. 4,526,938; PCT publication WO 91/05548; PCT publication WO 96/20698; Ning et al., “Intratumoral Radioimmunotheraphy of a Human Colon Cancer Xenograft Using a Sustained-Release Gel,” Radiotherapy & Oncology, 39:179 189, 1996; Song et al., “Antibody Mediated Lung Targeting of Long-Circulating Emulsions,” PDA Journal of Pharmaceutical Science & Technology, 50:372 397, 1995; Cleek et al., “Biodegradable Polymeric Carriers for a bFGF Antibody for Cardiovascular Application,” Pro. Intl. Symp. Control. Rel. Bioact. Mater., 24:853 854, 1997; and Lam et al., “Microencapsulation of Recombinant Humanized Monoclonal Antibody for Local Delivery,” Proc. Int'l. Symp. Control Rel. Bioact. Mater., 24:759 760, 1997, each of which is incorporated herein by reference in its entirety. In one embodiment, a pump may be used in a controlled release system (see Langer, supra; Sefton, CRC Crit. Ref. Biomed. Eng., 14:20, 1987; Buchwald et al., Surgery, 88:507, 1980; and Saudek et al., N Engl. J. Med., 321:574, 1989). In another embodiment, polymeric materials can be used to achieve controlled release of agents comprising dual antigen-binding molecule, or antigen-binding fragments thereof (see e.g., Medical Applications of Controlled Release, Langer and Wise (eds.), CRC Pres., Boca Raton, Fla. (1974); Controlled Drug Bioavailability, Drug Product Design and Performance, Smolen and Ball (eds.), Wiley, N.Y. (1984); Ranger and Peppas, J., Macromol. Sci. Rev. Macromol. Chem., 23:61, 1983; see also Levy et al., Science, 228:190, 1985; During et al., Ann. Neurol., 25:351, 1989; Howard et al., J. Neurosurg., 7 1:105, 1989); U.S. Pat. Nos. 5,679,377; 5,916,597; 5,912,015; 5,989,463; 5,128,326; PCT Publication No. WO 99/15154; and PCT Publication No. WO 99/20253). In yet another embodiment, a controlled release system can be placed in proximity of the therapeutic target (e.g., an affected joint), thus requiring only a fraction of the systemic dose (see, e.g., Goodson, in Medical Applications of Controlled Release, supra, vol. 2, pp. 115 138 (1984)). Other controlled release systems are discussed in the review by Langer, Science, 249:1527 1533, 1990.

[0391] In addition, rAAVs can be used for in vivo delivery of transgenes for scientific studies such as optogenetics, gene knock-down with miRNAs, recombinase delivery for conditional gene deletion, gene editing with CRISPRs, and the like.

### 5.5. Pharmaceutical Compositions and Kits

[0392] The invention further provides a pharmaceutical composition comprising a pharmaceutically acceptable carrier and an agent of the invention, said agent comprising a rAAV molecule of the invention. In some embodiments, the pharmaceutical composition comprises rAAV combined with a pharmaceutically acceptable carrier for administration to a subject. In one embodiment, the term “pharmaceutically acceptable” means approved by a regulatory agency of the Federal or a state government or listed in the U.S. Pharmacopeia or other generally recognized pharmacopeia for use in animals, and more particularly in humans. The term “carrier” refers to a diluent, adjuvant (e.g., Freund's complete and incomplete adjuvant), excipient, or vehicle with which the agent is administered. Such pharmaceutical carriers can be sterile liquids, such as water and oils, including those of petroleum, animal, vegetable, or synthetic origin, including, e.g., peanut oil, soybean oil, mineral oil, sesame oil and the like. Water is a common carrier when the pharmaceutical composition is administered intravenously. Saline solutions and aqueous dextrose and glycerol solutions can also be employed as liquid carriers, particularly for injectable solutions. Suitable pharmaceutical excipients include starch, glucose, lactose, sucrose, gelatin, malt, rice, flour, chalk, silica gel, sodium stearate, glycerol monostearate, talc, sodium chloride, dried skim milk, glycerol, propylene, glycol, water, ethanol and the like. Additional examples of pharmaceutically acceptable carriers, excipients, and stabilizers include, but are not limited to, buffers such as phosphate, citrate, and other organic acids; antioxidants including ascorbic acid; low molecular weight polypeptides; proteins, such as serum albumin and gelatin; hydrophilic polymers such as polyvinylpyrrolidone; amino acids such as glycine, glutamine, asparagine, arginine or lysine; monosaccharides, disaccharides, and other carbohydrates including glucose, mannose, or dextrins; chelating agents such as EDTA; sugar alcohols such as mannitol or sorbitol; salt-forming counterions such as sodium; and/or nonionic surfactants such as TWEEN™, polyethylene glycol (PEG), and PLURONICS™ as known in the art. The pharmaceutical composition of the present invention can also include a lubricant, a wetting agent, a sweetener, a flavoring agent, an emulsifier, a suspending agent, and a preservative, in addition to the above ingredients. These compositions can take the form of solutions, suspensions, emulsion, tablets, pills, capsules, powders, sustained-release formulations and the like.

[0393] In certain embodiments of the invention, pharmaceutical compositions are provided for use in accordance with the methods of the invention, said pharmaceutical compositions comprising a therapeutically and/or prophylactically effective amount of an agent of the invention along with a pharmaceutically acceptable carrier.

[0394] In certain embodiments, the agent of the invention is substantially purified (i.e., substantially free from substances that limit its effect or produce undesired side-effects). In a specific embodiment, the host or subject is an animal, e.g., a mammal such as non-primate (e.g., cows, pigs, horses, cats, dogs, rats etc.) and a primate (e.g., monkey such as, a cynomolgus monkey and a human). In a certain embodiment, the host is a human.

[0395] The invention provides further kits that can be used in the above methods. In one embodiment, a kit comprises one or more agents of the invention, e.g., in one or more containers. In another embodiment, a kit further comprises one or more other prophylactic or therapeutic agents useful for the treatment of a condition, in one or more containers.

[0396] The invention also provides agents of the invention packaged in a hermetically sealed container such as an ampoule or sachette indicating the quantity of the agent or active agent. In one embodiment, the agent is supplied as a dry sterilized lyophilized powder or water free concentrate in a hermetically sealed container and can be reconstituted, e.g., with water or saline, to the appropriate concentration for administration to a subject. Typically, the agent is supplied as a dry sterile lyophilized powder in a hermetically sealed container at a unit dosage of at least 5 mg, more often at least 10 mg, at least 15 mg, at least 25 mg, at least 35 mg, at least 45 mg, at least 50 mg, or at least 75 mg. The lyophilized agent should be stored at between 2 and 8° C. in its original container and the agent should be administered within 12 hours, usually within 6 hours, within 5 hours, within 3 hours, or within 1 hour after being reconstituted. In an alternative embodiment, an agent of the invention is supplied in liquid form in a hermetically sealed container indicating the quantity and concentration of agent or active agent. Typically, the liquid form of the agent is supplied in a hermetically sealed container at least 1 mg/ml, at least 2.5 mg/ml, at least 5 mg/ml, at least 8 mg/ml, at least 10 mg/ml, at least 15 mg/kg, or at least 25 mg/ml.

[0397] The compositions of the invention include bulk drug compositions useful in the manufacture of pharmaceutical compositions (e.g., impure or non-sterile compositions) as well as pharmaceutical compositions (i.e., compositions that are suitable for administration to a subject or patient). Bulk drug compositions can be used in the preparation of unit dosage forms, e.g., comprising a prophylactically or therapeutically effective amount of an agent disclosed herein or a combination of those agents and a pharmaceutically acceptable carrier.

[0398] The invention further provides a pharmaceutical pack or kit comprising one or more containers filled with one or more of the agents of the invention. Additionally, one or more other prophylactic or therapeutic agents useful for the treatment of the target disease or disorder can also be included in the pharmaceutical pack or kit. The invention also provides a pharmaceutical pack or kit comprising one or more containers filled with one or more of the ingredients of the pharmaceutical compositions of the invention. Optionally associated with such container(s) can be a notice in the form prescribed by a governmental agency regulating the manufacture, use or sale of pharmaceuticals or biological products, which notice reflects approval by the agency of manufacture, use, or sale for human administration.

[0399] Generally, the ingredients of compositions of the invention are supplied either separately or mixed together in unit dosage form, for example, as a dry lyophilized powder or water-free concentrate in a hermetically sealed container such as an ampoule or sachette indicating the quantity of agent or active agent. Where the composition is to be administered by infusion, it can be dispensed with an infusion bottle containing sterile pharmaceutical grade water or saline. Where the composition is administered by injection, an ampoule of sterile water for injection or saline can be provided so that the ingredients may be mixed prior to administration.

### 6. EXAMPLES

[0400] The following examples report an analysis of surface-exposed loops on the AAV9 capsid to identify candidates for capsid engineering via insertional mutagenesis. The invention is illustrated by way of examples, describing the construction of rAAV9 capsids engineered to contain 7-mer peptides designed on the basis of the human axonemal dynein heavy chain tail. Briefly, three criteria were used for selecting surface loops that might be amenable to short peptide insertions: 1) minimal side chain interactions with adjacent loops; 2) variable sequence and structure between serotypes (lack of conserved sequences); and 3) the potential for interrupting commonly targeted neutralizing antibody epitopes. A panel of peptide insertion mutants was constructed and the individual mutants were screened for viable capsid assembly, peptide surface exposure, and potency. The top candidates were then used as templates for insertion of homing peptides to test if these peptide insertion points could be used to re-target rAAV vectors to tissues of interest. Further examples, demonstrate the increased transduction and tissue tropism for certain of the modified AAV capsids described herein.

### 6.1. Example 1

### Analysis of AAV9 Capsid

[0401] FIGS. 1 and 2 depict analysis of variable region four of the adeno-associated virus type 9 (AAV9 VR-IV) by amino acid sequence comparison to other AAVs VR-IV (FIG. 1) and protein model (FIG. 2). As seen, AAV9 VR-IV is exposed on the surface at the tip or outer surface of the 3-fold spike. Further analysis indicated that there are few side chain interactions between VR-IV and VR-V and that the sequence and structure of VR-IV is variable amongst AAV serotypes, and further that there is potential for interrupting a commonly-targeted neutralizing antibody epitope and thus, reducing immunogenicity of the modified capsid.

### 6.2. Example 2

### Construction of AAV9 Mutants

[0402] Eight AAV9 mutants were constructed, to each include a heterologous peptide but at different insertion points in the VR-IV loop. The heterologous peptide was a FLAG tag that was inserted immediately following the following residues in vectors identified as pRGNX1090-1097, as shown in Table 4.

TABLE 4

| | AAV9 VR-IV |
|---|---|
| Vector | Insertion site |
| designation | for FLAG tag |
| pRGNX1090 | I451 |
| pRGNX1091 | N452 |
| pRGNX1092 | G453 |
| pRGNX1093 | S454 |
| pRGNX1094 | G455 |
| pRGNX1095 | Q456 |
| pRGNX1096 | N457 |
| pRGNX1097 | Q458 |

### 6.3. Example 3

### Analysis of Packaging Efficiency

[0403] FIG. 3 depicts high packaging efficiency in terms of genome copies per mL (GC/mL) of wild type AAV9 and eight (8) candidate rAAV9 vectors (1090, 1091, 1092, 1093, 1094, 1095, 1096, and 1097), where the candidate vectors each contain a FLAG insert at different sites within AAV9′s VR-IV. All vectors were packaged with luciferase transgene in 10 mL culture to facilitate determining which insertion points did not interrupt capsid packaging; error bars represent standard error of the mean.

[0404] As seen, all candidates package with high efficiency.

### 6.4. Example 4

### Analysis of Surface FLAG Exposure

[0405] FIG. 4 depicts surface exposure of FLAG inserts in each of eight (8) candidate rAAV9 vectors (1090, 1091, 1092, 1093, 1094, 1095, 1096, and 1097), confirmed by immunoprecipitation of transduced vectors by binding to anti-FLAG resin. Binding to anti-FLAG indicates insertion points that allow formation of capsids that display the peptide insertion on the surface.

[0406] Transduced cells were lysed and centrifuged. 500 μL of cell culture supernatant was loaded on 20 μL agarose-FLAG beads and eluted with SDS-PAGE loading buffer also loaded directly on the gel. For a negative control, 293-ssc supernatant was used that contained no FLAG inserts.

[0407] As seen, 1090 had the lowest titer of the candidate vectors, indicating the least protein pulled down. Very low titers also were seen with the positive control. It is likely that not a sufficient amount of positive control had been loaded for visualization on SDS-PAGE.

### 6.5. Example 5

### Analysis of Transduction Efficiency

[0408] FIGS. 5A-5B depict transduction efficiency in Lec2 cells, transduced with capsid vectors carrying the luciferase gene as a transgene, that was packaged into either wild type AAV9 (9-luc), or into each of eight (8) candidate rAAV9 vectors (1090, 1091, 1092, 1093, 1094, 1095, 1096, and 1097); activity is expressed as percent luciferase activity, taking the activity of 9-luc as 100% (FIG. 5A), or as Relative Light Units (RLU) per microgram of protein (FIG. 5B).

[0409] CHO-derived Lec2 cells were grown in aMEM and 10% FBS. The Lec2 cells were transduced at a MOI of about 2×10⁸ GC vector (a MOI of about 10,000) and were treated with ViraDuctin reagent (similar results were observed on transducing Lec2 cells at a MOI of about 10,000 GC/cell but treated with 40 μg/mL zinc chloride (ZnCl₂); results not shown). Lec2 cells are proline auxotrophs from CHO.

[0410] As seen, transduction efficiency in vitro is lower than that obtained using wild type AAV9 (9-luc). Nonetheless, previous studies have shown that introduction of a homing peptide can decrease in vitro gene transfer in non-target cells (such as 293, Lec2, or HeLa), while significantly increasing in vitro gene transfer in target cells (see, e.g., Nicklin et al. 2001; and Grifman et al. 2001).

### 6.6. Example 6

### Analysis of Packaging Efficiency as a Factor of Insertion Peptide Composition and Length

[0411] FIG. 6A depicts a bar graph illustrating that insertions immediately after S454 of AAV9 capsid (SEQ ID NO:118) of varying peptide length and composition may affect production efficiencies of AAV particles in a packaging cell line. Ten peptides of varying composition and length were inserted after S454 (between residues 454 and 455) within AAV9 VR-IV. qPCR was performed on harvested supernatant of transfected suspension HEK293 cells five days post-transfection. The results depicted in the bar graph demonstrate that the nature and length of the insertions may affect the ability of AAV particles to be produced at high titer and packaged in 293 cells. (Error bars represent standard error of the mean length of peptide, which is noted on the Y-axis in parenthesis.)

[0412] AAV9 vectors having an capsid protein containing a homing peptide of the following peptide sequences (Table 5) at the S454 insertion site were studied. Suspension-adapted HEK293 cells were seeded at 1x10⁶ cells/mL one day before transduction in 10mL of media. Triple plasmid DNA transfections were done with PElpro® (Polypus transfection) at a DNA:PEI ratio of 1:1.75. Cells were spun down and supernatant harvested five days post-transfection and stored at -80° C.

TABLE 5

| | Tissue or Target | Peptide | SEQ |
|---|---|---|---|
| Peptide# | Designation | Sequence | ID NO: |
| P1 | Bone1 (D8) | DDDDDDDD | 9 |
| P2 | Brain1 | LSSRLDA | 10 |
| P3 | Brain2 | CLSSRLDAC | 11 |
| P4 | Kidney1 | LPVAS | 13 |
| P5 | Kidney2 | CLPVASC | 12 |
| P6 | Muscle1 | ASSLNIA | 14 |
| P7 | TfR1 | HAIYPRH | 17 |
| P8 | TfR2 | THRPPMWSPVWP | 18 |
| P9 | TfR3 | RTIGPSV | 19 |
| P10 | TfR4 | CRTIGPSVC | 20 |

[0413] qPCR was performed on harvested supernatant of transfected suspension HEK293 cells five days post-transfection. Samples were subjected to DNase I treatment to remove residual plasmid or cellular DNA and then heat treated to inactivate DNase I and denature capsids. Samples were titered via qPCR using TaqMan Universal PCR Master Mix, No AmpEraseUNG (ThermoFisherScientific) and primer/probe against the polyA sequence packaged in the transgene construct. Standard curves were established using RGX-501 vector BDS.

[0414] Peptide insertions directly after S454 ranging from 5 to 10 amino acids in length produced AAV particles having adequate titer, whereas an upper size limit is possible, with significant packaging deficiencies observed for the peptide insertion having a length of 12 amino acids.

### 6.7. Example 7

### Homing Peptides Alter the Transduction Properties of AAV9 In Vitro when Inserted after S454.

[0415] FIGS. 6B-E depict fluorescence images of cell cultures of (FIG. 6B) Lec2 cell line (sialic acid-deficient epithelial cell line) (FIG. 6C) HT-22 cell line (neuronal cell line), (FIG. 6D) hCMEC/D3 cell line (brain endothelial cell line), and (FIG. 6E) C2C12 cell line (muscle cell line). AAV9 wild type and S454 insertion homing peptide capsids of Table 5 containing GFP transgene were used to transduce the noted cell lines.

[0416] Cell lines were plated at 5-20×10³ cells/well (depending on the cell line) in 96-well 24 hours before transduction. Cells were transduced with AAV9-GFP vectors (with or without insertions) at 1×10¹° particles/well and analyzed via Cytation5 (BioTek) 48-96 hours after transduction, depending on the difference in expression rate in each cell line. Lec2 cells were cultured as in Example 5, blood-brain barrier hCMEC/D3 (EMD Millipore) cells were cultured according to manufacturer's protocol, HT-22 and HU-17 cells were cultured in DMEM and 10% FBS, and C2C12 myoblasts were plated in DMEM and 10% FBS and differentiated for three days pre-transfection in DMEM supplemented with 2% horse serum and 0.1% insulin. AAV9.S454.FLAG showed low transduction levels in every cell type tested.

[0417] Images show that homing peptides can alter the transduction properties of AAV9 in vitro when inserted after S454 in the AAV9 capsid protein, as compared to unmodified AAV9 capsid. P7 (TfR1 peptide, HAIYPRH (SEQ ID NO: 17)) for all cell lines show the highest rate of transduction followed by P9 (TfR3 peptide, RTIGPSV (SEQ ID NO: 19)). P4 (Kidney1 peptide, LPVAS (SEQ ID NO: 13)) showed a slightly higher rate of transduction than that of AAV9 wildtype for all cell types. Higher transduction rates were observed for P6 (Muscle1 peptide, ASSLNIA (SEQ ID NO: 14)) in the brain endothelial hCMEC/D3 cell line and the C2C12 muscle cell line cultures as compared to the Lec2 and HT-22 cell line cultures. P1 vector was not included in images due to extremely low transduction efficiency, and P8 vector was not included due to low titer.

### 6.8. Example 8

### Analysis of Human Axonemal Dynein (HAD)

[0418] FIGS. 7A-7M depict the amino acid sequences for heavy chain tail domains of human axonemal dynein 1-12, 14 and 17, respectively.

### 6.9. Example 9

### Analysis of AAV Capsids for Peptide Insertion Points

[0419] FIG. 8 depicts alignment of AAVs 1-9e, rh10, rh20, rh39, rh74 and hu.37 capsid sequences within insertion sites for human axonemal dynein peptides within or near the initiation codon of VP2, variable region 1 (VR-I), variable region 4 (VR-IV), and variable region 8 (VR-VIII) highlighted in grey; a particular insertion site within variable region eight (VR-VIII) of each capsid protein is shown by the symbol “#” (after amino acid residue 588 according to the amino acid numbering of AAV9).

### 6.10. Example 10

### Construction of rAAV Capsid containing ARA290

[0420] FIG. 9 depicts the amino acid sequence for a recombinant AAV9 vector capsid including a peptide insertion of ARA290 between Q588 and A589 of the AAV9 capsid amino acid sequence (SEQ ID NO: 153).

### 6.11. Example 11

### Comparison of AAV Genome Copies/μg genomic DNA of Various Vectors

[0421] FIG. 10 depicts copies of GFP (green fluorescent protein) transgene expressed in mouse brain cells, following administration of the AAV vectors: AAV9; AAV.PHP.eB; AAV.hDyn (AAV9 with TLAAPFK (SEQ ID NO: 2) between 588-589 with no other amino acid modifications to the capsid sequence); AAV.PHP.S; and AAV.PHP.SH (see Table 10).

[0422] AAV.PHP.B is a capsid having a TLAVPFK (SEQ ID NO: 27) insertion in AAV9 capsid, with no other amino acid modifications to the capsid sequence. AAV.PHP.eB is a capsid having a TLAVPFK (SEQ ID NO: 27) insertion in AAV9 capsid, with two amino acid modifications of the capsid sequence upstream of the PHP.B insertion (see also Table 10). Table 6A summarizes the capsids utilized in the study.

TABLE 6A

| | | | | | SEQ |
|---|---|---|---|---|---|
| | Parent | | Location of | Peptide | ID |
| Name | capsid | Mutation | insertion 2 | 2 | NO: |
| AAV9 | AAV9 | — | — | — | |
| PHP.B | AAV9 | — | 588_589 | TLAVPFK | 27 |
| PHP.eB | AAV9 | 586A_587Q | 588_589 | TLAVPFK | 27 |
| | | delinsDG | | | |
| AAV.hDyn | AAV9 | — | 588_589 | TLAAPFK | 2 |
| AAV.PHP.S | AAV9 | — | 588_589 | QAVRTSL | 23 |
| AAV.PHP.SH | AAV9 | — | 588_589 | QAVRTSH | 24 |

### Materials and Methods

[0423] Constructs of AAV9, AAV.PHPeB, AAV.hDyn, AAV.PHP.S and AAV.PHP.SH encoding GFP transgene were prepared and formulated in 1× PBS+0.001% Pluronic. Female C57BL/6 mice were randomized into treatment groups base on Day 1 bodyweight. Five groups of female C57BL/6 mice were each intravenously administered AAV9.GFP, AAV.PHPeB.GFP, AAV.hDyn.GFP, AAV.PHP.S.GFP or AAV.PHP.SH.GFP in accordance with Table 6B, below. The dosing volume was 10 mL/kg (0.200 mL/20 g mouse). The mice were 8-12 weeks of age at the start date. At day 15 post administration, the animals were euthanized, and peripheral tissues were collected, including brain tissue, liver, forelimb biceps, heart, kidney, lung, ovaries, and the sciatic nerve.

TABLE 6B

| | | | Formulation | | |
|---|---|---|---|---|---|
| Gr. | N | Agent | dose | Route | Schedule |
| 1 | 9 | AAV9 | 2.5E12 GC/kg | iv | day 1 |
| 2 | 5 | PHPeB | 2.5E12 GC/kg | iv | day 1 |
| 3 | 5 | hDyn | 2.5E12 GC/kg | iv | day 1 |
| 4 | 5 | PHP.S | 2.5E12 GC/kg | iv | day 1 |
| 5 | 5 | PHP.SH | 2.5E12 GC/kg | iv | day 1 |

[0424] Quantitiative PCR (qPCR) was used to determine the number of vector genomes per μg of brain genomic DNA. Brain samples from injected mice were processed and genomic DNA was isolated using Blood and Tissue Genomic DNA kit from Qiagen. The qPCR assay was run on a QuantStudio 5 instrument (Life Technologies Inc) using primer-probe combination specific for eGFP following a standard curve method.

[0425] The AAV vector genome copies per μg of brain genomic DNA was at least a log higher in mice that were administered AAV.hDyn compared to all other AAV serotypes: AAV9, AAV.PHPeB, PHP.S, and PHP.SH (see FIG. 10). As seen in this study, GC/μg genomic DNA is highest for AAV.hDyn, which is AAV9 capsid containing the “TLAAPFK” (SEQ ID NO: 2) peptide insert (a peptide from human axonemal dynein) between residues 588-589 of the AAV9 capsid. The study demonstrated transduction in mouse brain at greater than 1E04 GC/μg transgene on average in 5 mice systemically administered AAV.hDyn carrying eGFP. Other modified AAV9 capsids, however, including the vector AAV.PHPeB, which contains the “TLAVPFK” (SEQ ID NO: 27) sequence (a peptide from mouse dynein) demonstrated transduction in mouse brain at less than 1E03 GC/μg transgene upon systemic treatment.

### 6.12. Example 12

### Use of Tissue-Homing rAAV Vector in Methods of Treatment

[0426] A disorder is identified that can be treated/prevented by providing a nucleic acid (transgene) (see Tables 3A-3B). A subject having the disorder associated with a target tissue is identified. The subject is administered a first amount of a rAAV vector of the invention, where the vector comprises a capsid protein with a peptide insertion that homes to the target tissue and carries the transgene to be delivered. If needed, the subject is administered a second or third dose of the vector, until a therapeutically effective amount of the transgene is delivered to the target tissue to provide a therapeutic or prophylactic benefit to the subject.

[0427] In some embodiments, methods are provided for administering a transgene to the retina, whereby an AAV.hDyn capsid encapsidating the transgene is administered intravenously, systemically or intravitreally.

### 6.13. Example 13

### Construction of rAAV Capsid containing TLAAPFK (SEQ ID NO: 2)

[0428] FIG. 11A depicts the amino acid sequence for a recombinant AAV9 vector capsid including a peptide insertion of amino acid sequence TLAAPFK (SEQ ID NO: 2) between Q588 and A589 of VR-IIIV. Inserted peptide in bold.

[0429] FIG. 11B depicts the amino acid sequence for a recombinant AAV9 vector capsid including a peptide insertion of amino acid sequence TLAAPFK (SEQ ID NO: 2) between S268 and S269 of VR-III. Inserted peptide in bold.

[0430] FIG. 11C depicts the amino acid sequence for a recombinant AAV9 vector capsid including a peptide insertion of amino acid sequence TLAAPFK (SEQ ID NO: 2) between S454 and G455 of VR-IV. Inserted peptide in bold.

### 6.14. Example 14

### Construction of rAAV Capsid containing KMQVPFQ (SEQ ID NO: 1)

[0431] FIG. 12A depicts the amino acid sequence for a recombinant AAV9 vector capsid including a peptide insertion of amino acid sequence KMQVPFQ (SEQ ID NO: 1) between Q588 and A589 of VR-VIII. Inserted peptide in bold.

[0432] FIG. 12B depicts the amino acid sequence for a recombinant AAV9 vector capsid including a peptide insertion of amino acid sequence KMQVPFQ (SEQ ID NO: 1) between S268 and S269 of VR-III. Inserted peptide in bold.

[0433] FIG. 12C depicts the amino acid sequence for a recombinant AAV9 vector capsid including a peptide insertion of amino acid sequence KMQVPFQ (SEQ ID NO: 1) between S454 and G455 of VR-IV. Inserted peptide in bold.

### 6.15. Example 15

### Construction of rAAV Capsid containing QQAAPSF (SEQ ID NO: 3)

[0434] FIG. 13A depicts the amino acid sequence for a recombinant AAV9 vector capsid including a peptide insertion of amino acid sequence QQAAPSF (SEQ ID NO: 3) between Q588 and A589 of VR-VIII. Inserted peptide in bold.

[0435] FIG. 13B depicts the amino acid sequence for a recombinant AAV9 vector capsid including a peptide insertion of amino acid sequence QQAAPSF (SEQ ID NO: 3) between S268 and S269 of VR-III. Inserted peptide in bold.

[0436] FIG. 13C depicts the amino acid sequence for a recombinant AAV9 vector capsid including a peptide insertion of amino acid sequence QQAAPSF (SEQ ID NO: 3) between S454 and G455 of VR-IV. Inserted peptide in bold.

### 6.16. Example 16

### Construction of rAAV Capsid containing RYNAPFK (SEQ ID NO: 4)

[0437] FIG. 14A depicts the amino acid sequence for a recombinant AAV9 vector capsid including a peptide insertion of amino acid sequence RYNAPFK (SEQ ID NO: 4) between Q588 and A589 of VR-VIII. Inserted peptide in bold.

[0438] FIG. 14B depicts the amino acid sequence for a recombinant AAV9 vector capsid including a peptide insertion of amino acid sequence RYNAPFK (SEQ ID NO: 4) between S268 and S269 of VR-III. Inserted peptide in bold.

[0439] FIG. 14C depicts the amino acid sequence for a recombinant AAV9 vector capsid including a peptide insertion of amino acid sequence RYNAPFK (SEQ ID NO: 4) between S454 and G455 of VR-IV. Inserted peptide in bold.

### 6.17. Example 17

### Construction of rAAV Capsid containing LKLPPIV (SEQ ID NO: 5)

[0440] FIG. 15A depicts the amino acid sequence for a recombinant AAV9 vector capsid including a peptide insertion of amino acid sequence LKLPPIV (SEQ ID NO: 5) between Q588 and A589 of VR-VIII. Inserted peptide in bold.

[0441] FIG. 15B depicts the amino acid sequence for a recombinant AAV9 vector capsid including a peptide insertion of amino acid sequence LKLPPIV (SEQ ID NO: 5) between S268 and S269 of VR-III. Inserted peptide in bold.

[0442] FIG. 15C depicts the amino acid sequence for a recombinant AAV9 vector capsid including a peptide insertion of amino acid sequence LKLPPIV (SEQ ID NO: 5) between S454 and G455 of VR-IV. Inserted peptide in bold.

### 6.18. Example 18

### Construction of rAAV Capsid containing PFIKPFE (SEQ ID NO: 6)

[0443] FIG. 16A depicts the amino acid sequence for a recombinant AAV9 vector capsid including a peptide insertion of amino acid sequence PFIKPFE (SEQ ID NO: 6) between Q588 and A589 of VR-VIII. Inserted peptide in bold.

[0444] FIG. 16B depicts the amino acid sequence for a recombinant AAV9 vector capsid including a peptide insertion of amino acid sequence PFIKPFE (SEQ ID NO: 6) between S268 and S269 of VR-III. Inserted peptide in bold.

[0445] FIG. 16C depicts the amino acid sequence for a recombinant AAV9 vector capsid including a peptide insertion of amino acid sequence PFIKPFE (SEQ ID NO: 6) between S454 and G455 of VR-IV. Inserted peptide in bold.

### 6.19. Example 19

### Construction of rAAV Capsid containing TLSLPWK (SEQ ID NO: 7)

[0446] FIG. 17A depicts the amino acid sequence for a recombinant AAV9 vector capsid including a peptide insertion of amino acid sequence TLSLPWK (SEQ ID NO: 7) between Q588 and A589 of VR-VIII. Inserted peptide in bold.

[0447] FIG. 17B depicts the amino acid sequence for a recombinant AAV9 vector capsid including a peptide insertion of amino acid sequence TLSLPWK (SEQ ID NO: 7) between S268 and S269 of VR-III. Inserted peptide in bold.

[0448] FIG. 17C depicts the amino acid sequence for a recombinant AAV9 vector capsid including a peptide insertion of amino acid sequence TLSLPWK (SEQ ID NO: 7) between S454 and G455 of VR-IV. Inserted peptide in bold.

### 6.20. Example 20

### Construction of rAAV Capsid containing LGETTRP (SEQ ID NO: 15)

[0449] FIG. 18A depicts the amino acid sequence for a recombinant AAV8 vector capsid including a peptide insertion of amino acid sequence LGETTRP (SEQ ID NO: 15) between N590 and T591 of VR-VIII. Inserted peptide in bold.

[0450] FIG. 18B depicts the amino acid sequence for a recombinant AAV8 vector capsid including a peptide insertion of amino acid sequence LGETTRP (SEQ ID NO: 15) between A269 and T270 of VR-III. Inserted peptide in bold.

[0451] FIG. 18C depicts the amino acid sequence for a recombinant AAV8 vector capsid including a peptide insertion of amino acid sequence LGETTRP (SEQ ID NO: 15) between T453 and T454 of VR-IV. Inserted peptide in bold.

### 6.21. Example 21

### Construction of rAAV Capsid containing LALGETTRP (SEQ ID NO: 16)

[0452] FIG. 19A depicts the amino acid sequence for a recombinant AAV8 vector capsid including a peptide insertion of amino acid sequence LALGETTRP (SEQ ID NO: 16) between N590 and T591 of VR-VIII. Inserted peptide in bold.

[0453] FIG. 19B depicts the amino acid sequence for a recombinant AAV8 vector capsid including a peptide insertion of amino acid sequence LALGETTRP (SEQ ID NO: 16) between A269 and T270 of VR-III. Inserted peptide in bold.

[0454] FIG. 19C depicts the amino acid sequence for a recombinant AAV8 vector capsid including a peptide insertion of amino acid sequence LALGETTRP (SEQ ID NO: 16) between T453 and T454 of VR-IV. Inserted peptide in bold.

### 6.22. Example 22

### Assessment of Modified Capsids In Vitro and In Vivo

[0455] AAV capsid sequences were modified either by peptide insertions or guided mutagenesis and pooled to give a bar-coded library packaged with a GFP expression cassette. The modified vectors were then evaluated in an in vitro assay, as well as for in vivo bio-distribution in mice using next generation sequencing (NGS) and quantitative PCR. AAV.hDyn was identified as a high brain transduction vector from this pool and was further evaluated in individual delivery studies in mice to characterize its transduction profile. Additionally, immunohistochemistry analysis of brain sections was performed to understand the cellular tropism of this vector.

### 6.22.1 Example 22A

### In Vitro Testing of Transduction an Crossing Blood Brain Barrier

[0456] The ability of the modified capsids to cross the blood brain barrier was tested in an in vitro transwell assay using hCMEC/D3 BBB cells (SCC066, Millipore-Sigma) (see FIGS. 20A-20B). More specifically, the assay was essentially adapted from Sade, H. et al. (2014 PLoS ONE 9(4): e96340) A human Blood-Brain Barrier transcytosis assay reveals Antibody Transcytosis influenced by pH-dependent Receptor Binding, April 2014, Vol. 9, Issue 4; and Zhang, X., Blood-brain barrier shuttle peptides enhance AAV transduction in the brain after systemic administration, 2018 Biomaterials 176: 71-83. Briefly, 5×10⁴ hCMEC/D3 cells/cm² were seeded in collagen-coated transwell inserts in a 12-well plate. Each insert contained 500 μL media and the lower chamber contained 1 mL media. Media was replaced every second day. The supernatant was removed at 10 days post-seeding (the zero (0) timepoint). At this 0 timepoint, the cells were transduced by adding 1×10⁹ GC of vector to the upper insert chamber media. 10 μL lower chamber supernatant samples were removed for testing at intervals 0.5, 3, 6, and 23 hours post-transduction. Each condition (vector) was tested in duplicate, and measured for titer via qPCR against PolyA in triplicate.

[0457] FIGS. 20A-20B depict an in vitro transwell assay for AAV.hDyn (AAV9 with TLAAPFK (SEQ ID NO: 2) between amino acid residues 588-589) crossing a blood brain barrier (BBB) cell layer (FIG. 20A), and results showing that AAV.hDyn (indicated by inverted triangles in the figure) crosses the BBB cell layer of the assay faster than AAV9 (squares), as well as faster and to a greater extent than AAV2 (circles) (FIG. 20B). The developed in vitro assay predicted enhanced BBB cross-trafficking and similar assays can be used to predict targeting to other organs as well.

### 6.22.2 Example 22B

### Transduction and Biodistribution of Modified Capsids

### 6.22.2.1 Materials and Methods

[0458] Capsid modifications were performed on widely used AAV capsids including AAV8, AAV9, and AAVrh.10 by inserting various peptide sequences after the position S454 of the VR-IV (Table 7) or after position Q588 of the VR-VIII surface exposed loop of the AAV capsid, as well as insertions after the initiation codon of VP2, which begins at amino acid 137 (AAV4, AAV4-4, and AAV5) or at amino acid 138 (AAV1, AAV2, AAV3, AAV3-3, AAV6, AAV7, AAV8, AAV9, AAV9e, rh.10, rh.20, rh.39, rh.74, and hu.37) (FIG. 8) (see also Table 10 for certain capsid sequences). Selected single to multiple amino acid mutations were also used for modifying the capsids. See also, Yost et al., Structure-guided engineering of surface exposed loops on AAV Capsids. 2019. ASGCT Annual Meeting; and Wu et al., 2000 J. Virology (supra). It was confirmed that packaging efficiency was not negatively impacted following any of these capsid modifications in small scale.

[0459] rAAVs with certain modified capsids were tested for transduction in vitro in Lec2 cells as described above in Example 5. Modified AAVs tested for transduction in Lec2 cells as follows: eB 588 Ad, eB 588 Hep, eB 588 p79, eB 588 Rab, AAV9 588 Ad, AAV9 588 Hep, AAV9 588 p79, AAV9 588 Rab, eB VP2 Ad, eB VP2 Hep, eB VP2 p79, eB VP2 Rab, AAV9 VP2 Ad, AAV9 VP2 Hep, AAV9 VP2 p79, AAV9 VP2 Rab as compared to AAV9. See Table 7B below for identity of AAV capsids.

[0460] To test biodistribution, modified AAVs were packaged with an eGFP transgene cassette containing specific barcodes corresponding to each individual capsid. Novel barcoded vectors were pooled and injected into mice in order to increase the efficiency of screening.

[0461] To analyse the bio-distribution of genetically altered AAV vectors, various vectors encoding GFP were prepared and formulated in 1× PBS+0.0001% Pluronic acid. All vectors were made with cis plasmids containing a ten (10) bp barcode to enable next-generation sequencing (NGS) library (pool) preparation. Three (3) vector pools (Study 1, Study 2 and Study 3 vectors) were injected intravenously into a cohort of 5 female C57Bl/6 mice in accordance with Tables 7A-C. The dosing volume was 10 mL/kg (0.2 mL/20 g mouse) for each.

[0462] The mice were randomized into treatment groups based on Day 1 bodyweight and their age at start date was 8-12 weeks. At day 15 post administration, the animals were euthanized and peripheral tissues were collected, including brain, kidney, liver, sciatic nerve, lung, heart, and muscle tissue. In the studies where selected capsids from the pool were injected individually, the same protocol was followed

[0463] Genomic DNA (gDNA) was isolated from tissue samples using DNeasy Blood and Tissue kit (69506) from Qiagen. Each vector's barcode region was amplified with primers containing overlaps for NGS and unique dual indexing (UDI) and multiplex sequencing strategies, as recommended by the manufacturer (Illumina). Illumina MiSeq using reagent nano and micro kits v2 (MS-103-1001/1002) were used to determine the relative abundance of each barcoded AAV vector per sample collected from the mice. Accordingly, each vector sample in Tables 7A-C below was barcoded as noted above to allow for each read to be identified and sorted before the final data analysis. The data was normalized based on the composition of AAVs in the originally injected pool and quantified using the total genome copy number obtained from qPCR analysis with a primer-probe combination specific to the barcoded sample.

TABLE 7A

| | | | Insertion | | |
|---|---|---|---|---|---|
| Study 1 | Name | Capsid | Point | Peptide | Notes |
| BC01 | AAV9 | AAV9 | — | — | Blue bar, FIG. 21 |
| BCO2 | PHP.eB | PHP.eB | 588_589 | TLAVPFK | |
| | | | | (SEQ ID | |
| | | | | NO: 27) | |
| BC03 | AAV8.BBB | Modified | — | — | A269S |
| | | AAV8 | | | |
| BC04 | AAV9.BBB | Modified | — | — | S263G/S269T/A273T |
| | | AAV9 | | | |
| BC05 | AAV8.BBB.LD | Modified | — | — | A2695, 498- |
| | | AAV8 | | | NNN/AAA-500 |
| BC06 | AAV9.BBB.LD | Modified | — | — | 5263G/5269T/A273T, |
| | | AAV9 | | | 496-NNN/AAA-498 |
| BC07 | rh.10 | rh.10 | — | — | |
| BC08 | rh.10.LD | Modified | - | — | 498-NNN/AAA-500 |
| | | rh.10 | | | |
| BC09 | AAV.hDyn | modifiedAAV9 | 588_589 | TLAAPFK | Orange bar, FIG. |
| | | | | (SEQ ID | 21 |
| | | | | NO: 2) | |
| BC10 | PHP.S | PHP.S | 588_589 | QAVRTSL | — |
| | | | | (SEQ ID | |
| | | | | NO: 23) | |
| BC11 | PHP.SH | PHP.SH | 588_589 | QAVRTSH | — |
| | | | | (SEQ ID | |
| | | | | NO: 24) | |
| BC13 | rh39 | rh.39 | — | — | |

TABLE 7B

| | | | Insertion | | |
|---|---|---|---|---|---|
| Study 2 | Name | Capsid | Point | Peptide | Notes |
| BC20 | eB 588 Ad | PHP.eB | 588_589 | SITLVKSTQTV | Replaces |
| | | | | (SEQ ID NO: 21) | TLAVPFK peptide |
| | | | | | (SEQ ID NO: 27) |
| BC21 | eB 588 Hep | PHP.eB | 588_589 | TILSRSTQTG (SEQ | Replaces |
| | | | | ID NO: 22) | TLAVPFK peptide |
| | | | | | (SEQ ID NO: 27) |
| BC22 | eB 588 p79 | PHP.eB | 588_589 | VVMVGEKPITITQ | Replaces |
| | | | | HSVETEG (SEQ ID | TLAVPFK peptide |
| | | | | NO: 25) | (SEQ ID NO: 27) |
| BC23 | eB 588 Rab | PHP.eB | 588_589 | RSSEEDKSTQTT | Replaces |
| | | | | (SEQ ID NO: 26) | TLAVPFK peptide |
| | | | | | (SEQ ID NO: 27) |
| BC24 | 9 588 Ad | AAV9 | 588_589 | SITLVKSTQTV | |
| | | | | (SEQ ID NO: 21) | |
| BC25 | 9 588 Hep | AAV9 | 588_589 | TILSRSTQTG (SEQ | |
| | | | | ID NO: 22) | |
| BC26 | 9 588 p79 | AAV9 | 588_589 | VVMVGEKPITITQ | |
| | | | | HSVETEG (SEQ ID | |
| | | | | NO: 25) | |
| BC27 | 9 588 Rab | AAV9 | 588_589 | RSSEEDKSTQTT | |
| | | | | (SEQ ID NO: 26) | |
| BC28 | eB VP2 Ad | PHP.eB | 138_139 | SITLVKSTQTV | Also has |
| | | | | (SEQ ID NO: 21) | TLAVPFK (SEQ |
| | | | | | ID NO: 27) insert |
| | | | | | after residue 588 |
| BC29 | eB VP2 Hep | PHP.eB | 138_139 | TILSRSTQTG (SEQ | Also has |
| | | | | ID NO: 22) | TLAVPFK (SEQ |
| | | | | | ID NO: 27) insert |
| | | | | | after residue 588 |
| BC30 | eB VP2 p79 | PHP.eB | 138_139 | VVMVGEKPITITQ | Also has |
| | | | | HSVETEG (SEQ ID | TLAVPFK (SEQ |
| | | | | NO: 25) | ID NO: 27) insert |
| | | | | | after residue 588 |
| BC31 | AAV9 | AAV9 | — | — | |
| BC32 | eB VP2 Rab | PHP.eB | 138_139 | RSSEEDKSTQTT | Also has |
| | | | | (SEQ ID NO: 26) | TLAVPFK (SEQ |
| | | | | | ID NO: 27) insert |
| | | | | | after residue 588 |
| BC33 | 9 VP2 Ad | AAV9 | 138_139 | SITLVKSTQTV | |
| | | | | (SEQ ID NO: 21) | |
| BC34 | 9 VP2 Hep | AAV9 | 138_139 | TILSRSTQTG (SEQ | |
| | | | | ID NO: 22) | |
| BC35 | 9 VP2 p79 | AAV9 | 138_139 | VVMVGEKPITITQ | |
| | | | | HSVETEG (SEQ ID | |
| | | | | NO: 25) | |
| BC36 | 9 VP2 Rab | AAV9 | 138_139 | RSSEEDKSTQTT | |
| | | | | (SEQ ID NO: 26) | |

TABLE 7C

| | | | Insertion | | |
|---|---|---|---|---|---|
| Study 3 | Name | Capsid | Point | Peptide | Notes |
| BC01 | AAV9 | AAV9 | — | — | |
| BC03 | AAV8-BBB | AAV8 | — | — | A269S |
| BC07 | rh10 | rh.10 | — | — | |
| BC09 | AAV.hDyn | AAV.hDyn | 588_589 | TLAAPFK | |
| | | | | (SEQ ID NO: 2) | |
| BC12 | PHP.B | PHP.B | 588_589 | TLAVPFK | |
| | | | | (SEQ ID NO: | |
| | | | | 27) | |
| BC20 | AAV9 S454- | AAV9 | 454_455 | DDDDDDDD | |
| | D8 | | | (SEQ ID NO: 9) | |
| BC22 | AAV9 S454- | AAV9 | 454_455 | LSSRLDA | |
| | Brain1 | | | (SEQ ID NO: | |
| | | | | 10) | |
| BC23 | AAV9 S454- | AAV9 | 454_455 | CLSSRLDAC | |
| | Brian1C | | | (SEQ ID NO: | |
| | | | | 11) | |
| BC24 | AAV9 S454- | AAV9 | 454_455 | LPVAS (SEQ | |
| | Kidney1 | | | ID NO: 13) | |
| BC25 | AAV9 S454- | AAV9 | 454_455 | CLPVASC | |
| | Kidney1C | | | (SEQ ID NO: | |
| | | | | 12) | |
| BC26 | AAV9 S454- | AAV9 | 454_455 | ASSLNIA | |
| | Muscle1 | | | (SEQ ID NO: | |
| | | | | 14) | |
| BC27 | AAV9 S454- | AAV9 | 454_455 | HAIYPRH | |
| | TfR1 | | | (SEQ ID NO: | |
| | | | | 17) | |
| BC29 | AAV9 S454- | AAV9 | 454_455 | RTIGPSV | |
| | TfR3 | | | (SEQ ID NO: | |
| | | | | 19) | |
| BC30 | AAV9 S454- | AAV9 | 454_455 | CRTIGPSVC | |
| | TfR4 | | | (SEQ ID NO: | |
| | | | | 20) | |
| BC31 | AAV9 S454- | AAV9 | 454_455 | DYKDDDDK | |
| | FLAG | | | (SEQ ID NO: | |
| | | | | 52) | |
| BC37 | pRGX1005- | PHP.eB | 588_589 | TLAVPFK | |
| | PHP.eB (no | | | (SEQ ID NO: | |
| | BC) | | | 27) | |

[0464] In the studies where selected capsids from the pool were injected individually, qPCR was used to determine the number of vector genomes per μg of tissue genomic DNA. qPCR was done on a QuantStudio 5 (Life Technologies, Inc.) using primer-probe combination specific for eGFP following a standard curve method (FIG. 22).

[0465] From the study where individual vectors were injected into mice for characterization, formal in fixed mouse brains were sectioned at 40 μm thickness on a vibrating blade microtome (VT1000S, Leica) and the floating sections were probed with antibodies against GFP to look at the cellular distribution of the delivered vectors.

[0466] More specifically, fixed brains from the mice injected with AAV.hDyn were sectioned using a Vibratome (Leica, VT-1000) and the GFP expression was evaluated using an anti-GFP antibody (AB3080, Millipore Sigma), Vectastain ABC kit (PK-6100, Vector Labs) and DAB Peroxidase kit (SK-4100, Vector Labs). Broad distribution of GFP expressing cells were present throughout the brain in mice injected with AAV.hDyn, including distribution in the cortex, striatum, and hippocampus of the brain. FIGS. 23A-23C show the images from these regions and the scale bar is 400um (discussed below).

### 6.22.2.2 Results

[0467] Results are shown in FIG. 21, FIGS. 22A-22H, and FIGS. 23A-23C.

[0468] Data for the Lec2 cell transduction assay not shown. The AAV9 588 Hep (AAV9 with the peptide TILSRSTQTG (SEQ ID NO: 22) (DLC-AS2 in Table 1b) inserted after position 588) exhibited significantly greater transduction (4-fold) than wild type AAV9, and AAV9 VP2 Ad (AAV9 with the peptide SITLVKSTQTV (SEQ ID NO: 21) (DLC-AS1 in Table 1b) inserted after position 138), AAV9 VP2 Hep (AAV9 with the peptide TILSRSTQTG (SEQ ID NO: 22) (DLC-AS2 in Table 1b) inserted after position 138), and AAV9 VP2 Rab (AAV9 with the peptide RSSEEDKSTQTT (SEQ ID NO: 26) (DLC-AS4 in Table 1b) inserted after position 138) exhibited slightly greater transduction of the Lec2 cells relative to AAV9. The other AAVs assayed exhibited lower levels of transduction than AAV9.

[0469] FIG. 21 depicts results of Next Generation Sequencing (NGS) analysis of brain gDNA, revealing relative abundances (percent composition) of the capsid pool delivered to mouse brains following intravenous injection. The data was normalized based on the composition of AAVs in the originally injected pool and quantified using the total genome copy number obtained from qPCR analysis with a primer-probe combination specific to the eGFP sequence. Data shown are from three different experiments. Dotted lines indicate which vectors were pooled together. Parental AAV9 was used as standard and included in each pool. The “BC” identifiers are as indicated in Tables 7A, 7B and 7C above.

[0470] FIGS. 22A-22H depict an in vivo transduction profile of AAV.hDyn in female C57Bl/6 mice, showing copy number/microgram gDNA in naive mice, or mice injected with either AAV9 or AAV.hDyn in brain (FIG. 22A), liver (FIG. 22B), heart (FIG. 22C), lung (FIG. 22D), kidney (FIG. 22E), skeletal muscle (FIG. 22F), sciatic nerve (FIG. 22G), and ovary (FIG. 22H), where AAV.hDyn shows increased brain bio-distribution compared to AAV9. The AAV vector genome copies per μg of brain genomic DNA was at least a log higher in mice that were administered AAV.hDyn compared to the parental AAV9 vector.

[0471] FIGS. 23A-23C show images from the regions analysed in the Immunohistochemical Analysis described above; scale bar is 400 μm. FIGS. 23A-23C depict distribution of GFP from AAV.hDyn throughout the brain, where images of immunohistochemical staining of brain sections from the striatum (FIG. 23A), hippocampus (FIG. 23B), and cortex (FIG. 23C) revealed a global transduction of the brain by the modified vector.

### 6.22.2.3 Conclusions

[0472] AAV capsid modifications performed either by insertions in surface exposed loops of VR-IV and VR-VIII or by specific amino acid mutations did not affect their packaging efficiency and were able to produce similar titers in the production system described herein.

[0473] Intravenous administration of AAV.hDyn to mice resulted in higher relative abundance of the viral genome and greater brain cell transduction than other modified AAV vectors and AAV9 tested.

### 6.23. Example 23

### Homing Peptide Kidney1C Depicts Enhanced Transduction Following Systemic Delivery

[0474] AAV capsid sequences were modified either by peptide insertions and pooled to give a bar-coded library packaged with a GFP expression cassette. The bio-distribution profile of the modified AAV9 vectors were then evaluated in vivo in mice using next generation sequencing (NGS) and quantitative PCR. Recombinant AAV9 vectors including peptide insertion of amino acid sequences CLPVASC (SEQ ID NO: 12) (Kidney1C) or ASSLNIA (SEQ ID NO: 14) (Muscle 1) between S454 and G455 of VR-IV showed increased transduction efficiency of the kidney compared to the liver (FIG. 24).

### 6.23.1 Materials and Methods

[0475] Capsid modifications were performed on AAV9 by inserting various homing peptide sequences after the position S454 of the VR-IV surface exposed loop of the AAV capsid. It was confirmed that packaging efficiency was not negatively impacted following any of these capsid modifications in small scale. Peptide sequences are shown in Table 8 below. All modified AAVs were packaged with an eGFP transgene cassette containing specific barcodes corresponding to each individual capsid. These novel barcoded vectors were pooled in order to increase the efficiency of screening (as explained above in Example 22B; see Study 3, Table 7C).

[0476] Genetically altered AAV vectors were injected intravenously into mice as explained above in Example 22B with respect to Study 3 altered vectors. The data was normalized based on the composition of AAVs in the originally injected pool and quantified using the total genome copy number obtained from qPCR analysis with a primer-probe combination specific to the eGFP sequence, and kidney to liver tissue targeting was more closely examined.

### 6.23.2 Results and Conclusions

[0477] FIG. 24 depicts the ratio of kidney to liver in vivo transduction of AAV9 S454 vectors with different homing peptide insertions (Table 8) in female C57B1/6 mice. Kidney-to-liver transduction versus the total kidney transduction of the pool for modified capsids was used for the calculation. AAV9 S454 Kidney1 and AAV9 S454 Kidney2 (Kidney 1C) show increased kidney bio-distribution compared to parental AAV9. While the parental AAV9 vector shows increased transduction of the liver compared to the kidney with a ratio of ˜0.25, insertion of the kidney homing peptide 1C (and also Muscle 1) results in an increase of this ratio to ˜1.0. The AAV vector genome copies per μg of kidney gDNA was at least a 5-fold higher in mice that were administered AAV9 S454 Kidney1 or AAV9 S454 Musclel compared to all other AAV9 S454 vectors (see FIG. 24).

TABLE 8
Homing peptides used in biodistribution study

| | | Location | | | SEQ |
|---|---|---|---|---|---|
| | | of Peptide | | Peptide | ID |
| Name | Capsid | Insertion | Peptide Name | Sequence | NO: |
| AAV9 | AAV9 | 454_455 | — | — | |
| AAV9 S454-P2 | AAV9 | 454_455 | Brain1 | LSSRLDA | 10 |
| AAV9 S454-P3 | AAV9 | 454_455 | Brain2 | CLSSRLDAC | 11 |
| | | | (Brain1C) | | |
| AAV9 S454-P4 | AAV9 | 454_455 | Kidney1 | LPVAS | 13 |
| AAV9 S454-P5 | AAV9 | 454_455 | Kidney2 | CLPVASC | 12 |
| | | | (Kidney 1C) | | |
| AAV9 S454-P6 | AAV9 | 454_455 | Muscle1 | ASSLNIA | 14 |
| AAV9 S454-P7 | AAV9 | 454_455 | Tfr1 | HAIYPRH | 17 |
| AAV9 S454-P9 | AAV9 | 454_455 | Tfr3 | RTIGPSV | 19 |
| AAV9 S454- | AAV9 | 454_455 | Tfr4 | CRTIGPSVC | 20 |
| P10 | | | | | |

[0478] AAV capsid modifications performed by insertions of different homing peptides in surface exposed loop VR-IV did not affect their packaging efficiency and were able to produce similar titers in the production system described herein.

[0479] Intravenous administration of AAV9 S454 Kidney1 and AAV9 S454 Kidney1C to mice resulted in higher relative abundance of the viral genome and greater kidney cell transduction than other modified AAV9 vectors and the parental AAV9 vector tested. Intravenous administration of the AAV9 S454 Kidney1 or AAV9 S454 Musclel vector to mice resulted also in lower liver cell transduction.

### 6.24. Example 24

### Construction of rAAV Capsid containing TLAVPFK (SEQ ID NO: 27)

[0480] FIG. 25 depicts the amino acid sequence for a recombinant AAV9 vector capsid including a peptide insertion of amino acid sequence TLAVPFK (SEQ ID NO: 27) between S454 and G455 of VR-IV.

### 6.25. Example 25

### Biodistribution of an rAAV Vector Pool in Cynomolgus Monkeys

[0481] The administration, in vivo and post-mortem observations, and biodistribution of a pool of recombinant AAVs having engineered capsids and a GFP transgene will be evaluated following a single intravenous, intracerebroventricular or intravitreal injection in cynomolgus monkeys (Table 9). The pool contains multiple capsids each of which contains a unique barcode identification allowing identification using next generation sequencing (NGS) analysis following administration to cynomolgus monkeys. The cynomolgus monkey is chosen as the test system because of its established usefulness and acceptance as a model for AAV biodistribution studies in a large animal species and for further translation to human. All animals on this study are naïve with respect to prior treatment. The pool may comprise at least the following recombinant AAVs having the engineered capsids listed in Table 9.

TABLE 9
Recombinant AAVs for Cynomolgus monkey study

| | | | | | Peptide |
|---|---|---|---|---|---|
| | | Capsid | Location of | | SEQ ID |
| Name | Capsid | modification | insertion | Peptide | NO: |
| AAV8 | AAV8 | — | — | — | |
| AAV8.BBB | Modified | A269S | — | — | |
| | AAV8 | | | | |
| AAV8.BBB.LD | Modified | A269S, 498- | — | — | |
| | AAV8 | NNN/AAA-500 | | | |
| AAV9 | AAV9 | — | — | — | |
| AAV9 S454- | AAV9 | — | 454_455 | LSSRLDA | 10 |
| Brain1 | | | | | |
| AAV9 S454- | AAV9 | — | 454_455 | CLSSRLDAC | 11 |
| Brain1C | | | | | |
| AAV9 S454-D8 | AAV9 | — | 454_455 | DDDDDDDD | 9 |
| AAV9 S454- | AAV9 | — | 454_455 | LPVAS | 13 |
| Kidney1 | | | | | |
| AAV9 S454- | AAV9 | — | 454_455 | CLPVASC | 12 |
| Kidney1C | | | | | |
| AAV9 S454- | AAV9 | — | 454_455 | ASSLNIA | 14 |
| Muscle1 | | | | | |
| AAV9 S454-Tfr1 | AAV9 | — | 454_455 | HAIYPRH | 17 |
| AAV9 S454-Tfr3 | AAV9 | — | 454_455 | RTIGPSV | 19 |
| AAV9 S454- | AAV9 | — | 454_455 | CRTIGPSVC | 20 |
| TfR3C | | | | | |
| AAV9.496NNN/ | Modified | 498-NNN/AAA- | — | — | |
| AAA498 | AAV9 | 500 | | | |
| AAV9.496NNN/ | Modified | 498-NNN/AAA- | — | — | |
| AAA498.W503R | AAV9 | 500, W503R | | | |
| AAV9.588Ad | AAV9 | — | 588_589 | SITLVKSTQ | 21 |
| | | | | TV | |
| AAV9.588Herp | AAV9 | — | 588_589 | TILSRSTQT G | 22 |
| AAV9.BBB | Modified | S263G/S269T/ | — | — | |
| | AAV9 | A273T | | | |
| AAV9.BBB.LD | Modified | S263G/S269T/ | — | — | |
| | AAV9 | A273T, 496- | | | |
| | | NNN/AAA-498 | | | |
| AAV9.Q474A | Modified | Q474A | — | — | |
| | AAV9 | | | | |
| AAV9.W503R | Modified | W503R | — | — | |
| | AAV9 | | | | |
| AAVPHPeB.VP | PHP.eB | — | 138_139 | SITLVKSTQ | 21 |
| 2Ad | | | | TV | |
| AAVPHPeB.VP | PHP.eB | — | 138_139 | TILSRSTQT | 22 |
| 2Herp | | | | G | |
| PHP.B | AAV9 | — | 588_589 | TLAVPFK | 27 |
| PHP.eB | Modified | A587D, Q588G | 588_589 | TLAVPFK | 27 |
| | PHP.B | | | | |
| PHP.hB | AAV9 | — | 588_589 | QAVRTSL | 23 |
| PHP.S | | | | | |
| PHP.SH | AAV9 | — | 588_589 | QAVRTSH | 24 |

### 6.25.1. Study Design

[0482] Nine female cynomolgus animals will be used. Animals judged suitable for experimentation based on clinical sign data and prescreening antibody titers will be placed in study groups by body weight using computer-generated random numbers. Three different routes of administration will be used and relevant tissues collected to evaluate the biodistribution (measured by NGS and PCR) associated with the different routes. Three animals will be implanted with a catheter in the left lateral ventricle for intracerebroventricular (ICV) dose administration (Group 1), three animals will receive a single intravenous infusion (Group 2) and three animals will receive a single intravitreal injection (Group 3). Two animals will serve as replacement animals and will be implanted if required. Animals in Group 1 will have an MRI scan to determine coordinates for proper ICV catheter placement.

[0483] The IV infusion will be administered at a rate of 3 mL/min followed by 0.2 mL of vehicle to flush the dose from the IV catheter. The three intravenous animals will receive a single dose of the pooled recombinant AAVs at a volume of 4 mL/kg. The total dose (vg) and dose volume (mL/kg) will be recorded in the raw data. Based on literature review and previous studies in non-human primates, the IV dose of 1×10¹³ GC/kg body weight was determined to be required to have the desired distribution in the CNS from a systemic delivery as well as the peripheral tissues including skeletal muscle.

[0484] The ICV implanted animals will receive a single bolus dose at a volume of 1 mL of AAV-NAV-GFPbc (by slow infusion, approximately 0.1 mL/min) followed by 0.1 mL of vehicle to flush the dose from the catheter system. The ICV dose is based on distribution data from a previous non-human primate study to support current clinical programs.

[0485] The intravitreal (IVT) injection will be administered bilateral as a bolus injection at a dose volume of 50 μL.

### 6.25.2. Observations and Examinations

[0486] Clinical signs will be recorded at least once daily beginning approximately two weeks prior to initiation of dosing and continuing throughout the study period. The animals will be observed for signs of clinical effects, illness, and/or death. Additional observations may be recorded based upon the condition of the animal at the discretion of the Study Director and/or technicians.

[0487] Ophthalmological examinations will be performed on Group 3 animals prior to dose administration, and on Days 2, 8, 15 and 22. All animals will be sedated with ketamine hydrochloride IM for the ophthalmologic examinations performed following Day 1. For the examinations on Day 1, the animals will be sedated with injectable anesthesia (refer to Section 15.3.3). The eyes will be dilated with 1% tropicamide prior to the examination. The examination will include slit-lamp biomicroscopy and indirect ophthalmoscopy. Additionally, applanation tonometry will be performed on Group 3 animals prior to dosing, immediately following dose administration (-10 to 15 minutes) and on Days 2 and 22.

[0488] Blood samples (˜3 mL) will be collected from a peripheral vein for neutralizing antibodies analysis approximately 2 to 3 weeks prior to dose administration.

### 6.25.3. Bioanalytical Sample Collection

[0489] Whole blood samples (˜0.5 mL) will be collected from a peripheral vein for bioanalytical analysis (AAV capsid clearance) prior to dose administration, 3 (±10 minutes), 6 (±10 minutes) and 24 (±0.5 hour) hours following dose administration from animals in Group 2 (IV) only. The samples will be collected using a syringe and needle, transferred to two K₂ EDTA tubes and the times recorded.

[0490] Blood samples (˜5 mL) will be collected from fasted animals from a peripheral vein for PBMC analysis prior to dose administration (Day 1), on Days 8 and 15 and prior to necropsy (Day 22). The samples will be obtained using lithium heparin tubes and the times recorded.

[0491] Blood samples will be collected from a peripheral vein for bioanalytical analysis prior to dose administration (Day 1, 2 mL) and necropsy (Day 22, 5 mL). The samples will be collected in clot tubes and the times recorded. The tubes will be maintained at room temperature until fully clotted, then centrifuged at approximately 2400 rpm at room temperature for 15 minutes. The serum will be harvested, placed in labeled vials (necropsy sample split into 1 mL aliquots), frozen in liquid nitrogen, and stored at −60° C. or below.

[0492] CSF (˜1.5 mL) will be collected prior to dose administration from a cisterna magna spinal tap from animals in Group 1 only. CSF (-2 mL) will be collected immediately prior to necropsy from a cisterna magna spinal tap from all animals (Groups 1 to 3). An attempt to collect CSF will be made but due to unsuccessful spinal taps, samples may not be collected at all intervals from an animal(s). Upon collection, the samples will be stored on ice until processing.

### 6.25.4. Necroscopy

[0493] A gross necropsy will be performed on any animal found dead or sacrificed moribund, and at the scheduled necropsy, following at least 21 days of treatment (Day 22). All animals, except those found dead, will be sedated with 8 mg/kg of ketamine HCl IM, maintained on an isoflurane/oxygen mixture and provided with an intravenous bolus of heparin sodium, 200 IU/kg. The animals will be perfused via the left cardiac ventricle with 0.001% sodium nitrite in saline. Animals found dead will be necropsied but will not be perfused.

[0494] The following tissues will be saved from all animals (including those found dead): Bone marrow, brain, cecum, colon, dorsal nerve roots and ganglion, duodenum, esophagus, eyes with optic nerves, gross lesions, heart, ileum, jejunum, kidneys, knee joint, liver, lungs with bronchi, lymph nodes, ovaries, pancreas, sciatic nerve, skeletal muscle, spinal cord, spleen, thyroids, trachea, and vagus nerve.

### 6.25.5. Bioanalytical Analysis

[0495] The whole blood collected from animals in Group 2 (IV) will be evaluated by qPCR and Next-Generation Sequencing (NGS).

[0496] PBMC samples collected from all animals will be evaluated by flow cytometry and enzyme-linked immune absorbent spot (ELISpot), if required.

[0497] The presence of circulating neutralizing antibodies as well as free vector in the serum and/or CSF will be evaluated by ELISA and cell based assays, as needed.

[0498] The vector copy number and number of transcripts in tissues will be examined by quantitative PCR and NGS methods.

### 6.26. Capsid Amino Acid Sequences

[0499] Table 10 provides the amino acid sequences of certain engineered capsid proteins described and/or used in studies described herein. Heterologous peptides and amino acid substitutions are indicated in gray shading.

TABLE 10
Capsid Amino Acid Sequences

| Capsid | Insert or | | |
|---|---|---|---|
| Name | Substitution | Amino Acid Sequence | |
| PHP.S | QAVRTSL | 1 MAADGYLPDW LEDNLSEGIR EWWALKPGAP QPKANQQHQD NARGLVLPGY KYLGPGNGLD | |
| (Cali- | (SEQ ID | 61 KGEPVNAADA AALEHDKAYD QQLKAGDNPY LKYNHADAEF QERLKEDTSF GGNLGRAVFQ | |
| fornia | NO: 23) | 121 AKKRLLEPLG LVEEAAKTAP GKKRPVEQSP QEPDSSAGIG KSGAQPAKKR LNFGQTGDTE | |
| Insti- | (588_589) | 181 SVPDPQPIGE PPAAPSGVGS LTMASGGGAP VADNNEGADG VGSSSGNWHC DSQWLGDRVI | |
| tute of | | 241 TTSTRTWALP TYNNHLYKQI SNSTSGGSSN DNAYFGYSTP WGYFDFNRFH CHFSPRDWQR | |
| Tech- | | 301 LINNNWGFRP KRLNFKLFNI QVKEVTDNNG VKTIANNLTS TVQVFTDSDY QLPYVLGSAH | |
| nology | | 361 EGCLPPFPAD VFMIPQYGYL TLNDGSQAVG RSSFYCLEYF PSQMLRTGNN FQFSYEFENV | |
| Chan | | 421 PFHSSYAHSQ SLDRLMNPLI DQYLYYLSRT INGSGQNQQT LKFSVAGPSN MAVQGRNYIP | |
| et al | | 481 GPSYRQQRVS TTVTQNNNSE FAWPGASSWA LNGRNSLMNP GPAMASHKEG EDRFFPLSGS | |
| 2017) | | 541 LIFGKQGTGR DNVDADKVMI TNEEEIKTTN PVATESYGQV [chemical structure] | |
| | | 601 GWVQNQGILP GMVWQDRDVY LQGPIWAKIP HTDGNFHPSP LMGGFGMKHP PPQILIKNTP | |
| | | 661 VPADPPTAFN KDKLNSFITQ YSTGQVSVEI EWELQKENSK RWNPEIQYTS NYYKSNNVEF | |
| | | 721 AVNTEGVYSE PRPIGTRYLT RNL (SEQ ID NO: 60) | |
| PHP.SH | QAVRTSH | 1 MAADGYLPDW LEDNLSEGIR EWWALKPGAP QPKANQQHQD NARGLVLPGY KYLGPGNGLD | |
| | (SEQ ID | 61 KGEPVNAADA AALEHDKAYD QQLKAGDNPY LKYNHADAEF QERLKEDTSF GGNLGRAVFQ | |
| | NO: 24) | 121 AKKRLLEPLG LVEEAAKTAP GKKRPVEQSP QEPDSSAGIG KSGAQPAKKR LNFGQTGDTE | |
| | (588_589) | 181 SVPDPQPIGE PPAAPSGVGS LTMASGGGAP VADNNEGADG VGSSSGNWHC DSQWLGDRVI | |
| | | 241 TTSTRTWALP TYNNHLYKQI SNSTSGGSSN DNAYFGYSTP WGYFDFNRFH CHFSPRDWQR | |
| | | 301 LINNNWGFRP KRLNFKLFNI QVKEVTDNNG VKTIANNLTS TVQVFTDSDY QLPYVLGSAH | |
| | | 361 EGCLPPFPAD VFMIPQYGYL TLNDGSQAVG RSSFYCLEYF PSQMLRTGNN FQFSYEFENV | |
| | | 421 PFHSSYAHSQ SLDRLMNPLI DQYLYYLSRT INGSGQNQQT LKFSVAGPSN MAVQGRNYIP | |
| | | 481 GPSYRQQRVS TTVTQNNNSE FAWPGASSWA LNGRNSLMNP GPAMASHKEG EDRFFPLSGS | |
| | | 541 LIFGKQGTGR DNVDADKVMI TNEEEIKTTN PVATESYGQV [chemical structure] | |
| | | 601 GWVQNQGILP GMVWQDRDVY LQGPIWAKIP HTDGNFHPSP LMGGFGMKHP PPQILIKNTP | |
| | | 661 VPADPPTAFN KDKLNSFITQ YSTGQVSVEI EWELQKENSK RWNPEIQYTS NYYKSNNVEF | |
| | | 721 AVNTEGVYSE PRPIGTRYLT RNL (SEQ ID NO: 61) | |
| PHP.B | TLAVPFK | 1 MAADGYLPDW LEDNLSEGIR EWWALKPGAP QPKANQQHQD NARGLVLPGY KYLGPGNGLD | |
| (Cali- | (SEQ ID | 61 KGEPVNAADA AALEHDKAYD QQLKAGDNPY LKYNHADAEF QERLKEDTSF GGNLGRAVFQ | |
| fornia | NO: 27) | 121 AKKRLLEPLG LVEEAAKTAP GKKRPVEQSP QEPDSSAGIG KSGAQPAKKR LNFGQTGDTE | |
| Insti- | (588_589) | 181 SVPDPQPIGE PPAAPSGVGS LTMASGGGAP VADNNEGADG VGSSSGNWHC DSQWLGDRVI | |
| tute of | | 241 TTSTRTWALP TYNNHLYKQI SNSTSGGSSN DNAYFGYSTP WGYFDFNRFH CHFSPRDWQR | |
| Tech- | | 301 LINNNWGFRP KRLNFKLFNI QVKEVTDNNG VKTIANNLTS TVQVFTDSDY QLPYVLGSAH | |
| nology | | 361 EGCLPPFPAD VFMIPQYGYL TLNDGSQAVG RSSFYCLEYF PSQMLRTGNN FQFSYEFENV | |
| GenBank | | 421 PFHSSYAHSQ SLDRLMNPLI DQYLYYLSRT INGSGQNQQT LKFSVAGPSN MAVQGRNYIP | |
| entry: | | 481 GPSYRQQRVS TTVTQNNNSE FAWPGASSWA LNGRNSLMNP GPAMASHKEG EDRFFPLSGS | |
| ALU851 | | 541 LIFGKQGTGR DNVDADKVMI TNEEEIKTTN PVATESYGQV [chemical structure] | |
| 56.1- | | 601 GWVQNQGILP GMVWQDRDVY LQGPIWAKIP HTDGNFHPSP LMGGFGMKHP PPQILIKNTP | |
| Deverman | | 661 VPADPPTAFN KDKLNSFITQ YSTGQVSVEI EWELQKENSK RWNPEIQYTS NYYKSNNVEF | |
| et al | | 721 AVNTEGVYSE PRPIGTRYLT RNL (SEQ ID NO: 62) | |
| 2016) | | | |
| PHP.eB | TLAVPFK | 1 MAADGYLPDW LEDNLSEGIR EWWALKPGAP QPKANQQHQD NARGLVLPGY KYLGPGNGLD | |
| (Cali- | (SEQ ID | 61 KGEPVNAADA AALEHDKAYD QQLKAGDNPY LKYNHADAEF QERLKEDTSF GGNLGRAVFQ | |
| fornia | NO: 27) | 121 AKKRLLEPLG LVEEAAKTAP GKKRPVEQSP QEPDSSAGIG KSGAQPAKKR LNFGQTGDTE | |
| Insti- | (588_589) | 181 SVPDPQPIGE PPAAPSGVGS LTMASGGGAP VADNNEGADG VGSSSGNWHC DSQWLGDRVI | |
| tute of | | 241 TTSTRTWALP TYNNHLYKQI SNSTSGGSSN DNAYFGYSTP WGYFDFNRFH CHFSPRDWQR | |
| Tech- | | 301 LINNNWGFRP KRLNFKLFNI QVKEVTDNNG VKTIANNLTS TVQVFTDSDY QLPYVLGSAH | |
| nology- | | 361 EGCLPPFPAD VFMIPQYGYL TLNDGSQAVG RSSFYCLEYF PSQMLRTGNN FQFSYEFENV | |
| Chan | | 421 PFHSSYAHSQ SLDRLMNPLI DQYLYYLSRT INGSGQNQQT LKFSVAGPSN MAVQGRNYIP | |
| et al | | 481 GPSYRQQRVS TTVTQNNNSE FAWPGASSWA LNGRNSLMNP GPAMASHKEG EDRFFPLSGS | |
| 2017) | | 541 LIFGKQGTGR DNVDADKVMI TNEEEIKTTN PVATESYGQV [chemical structure] | |
| | | 601 GWVQNQGILP GMVWQDRDVY LQGPIWAKIP HTDGNFHPSP LMGGFGMKHP PPQILIKNTP | |
| | | 661 VPADPPTAFN KDKLNSFITQ YSTGQVSVEI EWELQKENSK RWNPEIQYTS NYYKSNNVEF | |
| | | 721 AVNTEGVYSE PRPIGTRYLT RNL (SEQ ID NO: 63) | |
| AAV8. | A269S | MAADGYLPDW LEDNLSEGIR EWWALKPGAP KPKANQQKQD DGRGLVLPGY KYLGPFNGLD | 60 |
| BBB | | KGEPVNAADA AALEHDKAYD QQLQAGDNPY LRYNHADAEF QERLQEDTSF GGNLGRAVFQ | 120 |
| | | AKKRVLEPLG LVEEGAKTAP GKKRPVEPSP QRSPDSSTGI GKKGQQPARK RLNFGQTGDS | 180 |
| | | ESVPDPQPLG EPPAAPSGVG PNTMAAGGGA PMADNNEGAD GVGSSSGNWH CDSTWLGDRV | 240 |
| | | ITTSTRTWAL PTYNNHLYKQ [chemical structure] NDNTYFGYST PWGYFDFNRF HCHFSPRDWQ | 300 |
| | | RLINNNWGFR PKRLSFKLFN IQVKEVTQNE GTKTIANNLT STIQVFTDSE YQLPYVLGSA | 360 |
| | | HQGCLPPFPA DVFMIPQYGY LTLNNGSQAV GRSSFYCLEY FPSQMLRTGN NFQFTYTFED | 420 |
| | | VPFHSSYAHS QSLDRLMNPL IDQYLYYLSR TQTTGGTANT QTLGFSQGGP NTMANQAKNW | 480 |
| | | LPGPCYRQQR VSTTTGQNNN SNFAWTAGTK YHLNGRNSLA NPGIAMATHK DDEERFFPSN | 540 |
| | | GILIFGKQNA ARDNADYSDV MLTSEEEIKT TNPVATEEYG IVADNLQQQN TAPQIGTVNS | 600 |
| | | QGALPGMVWQ NRDVYLQGPI WAKIPHTDGN FHPSPLMGGF GLKHPPPQIL IKNTPVPADP | 660 |
| | | PTTFNQSKLN SFITQYSTGQ VSVEIEWELQ KENSKRWNPE IQYTSNYYKS TSVDFAVNTE | 720 |
| | | GVYSEPRPIG TRYLTRNL (SEQ ID NO: 64) | |
| AAV8. | A269S, | MAADGYLPDW LEDNLSEGIR EWWALKPGAP KPKANQQKQD DGRGLVLPGY KYLGPFNGLD | 60 |
| BBB. | 498_NNN/ | KGEPVNAADA AALEHDKAYD QQLQAGDNPY LRYNHADAEF QERLQEDTSF GGNLGRAVFQ | 120 |
| LD | AAA_500 | AKKRVLEPLG LVEEGAKTAP GKKRPVEPSP QRSPDSSTGI GKKGQQPARK RLNFGQTGDS | 180 |
| | | ESVPDPQPLG EPPAAPSGVG PNTMAAGGGA PMADNNEGAD GVGSSSGNWH CDSTWLGDRV | 240 |
| | | ITTSTRTWAL PTYNNHLYKQ [chemical structure] NDNTYFGYST PWGYFDFNRF HCHFSPRDWQ | 300 |
| | | RLINNNWGFR PKRLSFKLFN IQVKEVTQNE GTKTIANNLT STIQVFTDSE YQLPYVLGSA | 360 |
| | | HQGCLPPFPA DVFMIPQYGY LTLNNGSQAV GRSSFYCLEY FPSQMLRTGN NFQFTYTFED | 420 |
| | | VPFHSSYAHS QSLDRLMNPL IDQYLYYLSR TQTTGGTANT QTLGFSQGGP NTMANQAKNW | 480 |
| | | LPGPCYRQQR [chemical structure] SNFAWTAGTK YHLNGRNSLA NPGIAMATHK DDEERFFPSN | 540 |
| | | GILIFGKQNA ARDNADYSDV MLTSEEEIKT TNPVATEEYG IVADNLQQQN TAPQIGTVNS | 600 |
| | | QGALPGMVWQ NRDVYLQGPI WAKIPHTDGN FHPSPLMGGF GLKHPPPQIL IKNTPVPADP | 660 |
| | | PTTFNQSKLN SFITQYSTGQ VSVEIEWELQ KENSKRWNPE IQYTSNYYKS TSVDFAVNTE | 720 |
| | | GVYSEPRPIG TRYLTRNL (SEQ ID NO: 65) | |
| AAV9. | S263G/ | MAADGYLPDW LEDNLSEGIR EWWALKPGAP QPKANQQHQD NARGLVLPGY KYLGPGNGLD | 60 |
| BBB | S269T | KGEPVNAADA AALEHDKAYD QQLKAGDNPY LKYNHADAEF QERLKEDTSF GGNLGRAVFQ | 120 |
| | A273T | AKKRLLEPLG LVEEAAKTAP GKKRPVEQSP QEPDSSAGIG KSGAQPAKKR LNFGQTGDTE | 180 |
| | | SVPDPQPIGE PPAAPSGVGS LTMASGGGAP VADNNEGADG VGSSSGNWHC DSQWLGDRVI | 240 |
| | | TTSTRTWALP TYNNHLYKQI [chemical structure] WGYFDFNRFH CHFSPRDWQR | 300 |
| | | LINNNWGFRP KRLNFKLFNI QVKEVTDNNG VKTIANNLTS TVQVFTDSDY QLPYVLGSAH | 360 |
| | | EGCLPPFPAD VFMIPQYGYL TLNDGSQAVG RSSFYCLEYF PSQMLRTGNN FQFSYEFENV | 420 |
| | | PFHSSYAHSQ SLDRLMNPLI DQYLYYLSKT INGSGQNQQT LKFSVAGPSN MAVQGRNYIP | 480 |
| | | GPSYRQQRVS TTVTQNNNSE FAWPGASSWA LNGRNSLMNP GPAMASHKEG EDRFFPLSGS | 540 |
| | | LIFGKQGTGR DNVDADKVMI TNEEEIKTTN PVATESYGQV ATNHQSAQAQ AQTGWVQNQG | 600 |
| | | ILPGMVWQDR DVYLQGPIWA KIPHTDGNFH PSPLMGGFGM KHPPPQILIK NTPVPADPPT | 660 |
| | | AFNKDKLNSF ITQYSTGQVS VEIEWELQKE NSKRWNPEIQ YTSNYYKSNN VEFAVNTEGV | 720 |
| | | YSEPRPIGTR YLTRNL (SEQ ID NO: 66) | |
| AAV9. | S263G/ | MAADGYLPDW LEDNLSEGIR EWWALKPGAP QPKANQQHQD NARGLVLPGY KYLGPGNGLD | 60 |
| BBB. | S269T | KGEPVNAADA AALEHDKAYD QQLKAGDNPY LKYNHADAEF QERLKEDTSF GGNLGRAVFQ | 120 |
| LD | A273T, | AKKRLLEPLG LVEEAAKTAP GKKRPVEQSP QEPDSSAGIG KSGAQPAKKR LNFGQTGDTE | 180 |
| | 496_NNN/ | SVPDPQPIGE PPAAPSGVGS LTMASGGGAP VADNNEGADG VGSSSGNWHC DSQWLGDRVI | 240 |
| | AAA_498 | TTSTRTWALP TYNNHLYKQI [chemical structure] WGYFDFNRFH CHFSPRDWQR | 300 |
| | | LINNNWGFRP KRLNFKLFNI QVKEVTDNNG VKTIANNLTS TVQVFTDSDY QLPYVLGSAH | 360 |
| | | EGCLPPFPAD VFMIPQYGYL TLNDGSQAVG RSSFYCLEYF PSQMLRTGNN FQFSYEFENV | 420 |
| | | PFHSSYAHSQ SLDRLMNPLI DQYLYYLSKT INGSGQNQQT LKFSVAGPSN MAVQGRNYIP | 480 |
| | | GPSYRQQRVS [chemical structure] FAWPGASSWA LNGRNSLMNP GPAMASHKEG EDRFFPLSGS | 540 |
| | | LIFGKQGTGR DNVDADKVMI TNEEEIKTTN PVATESYGQV ATNHQSAQAQ AQTGWVQNQG | 600 |
| | | ILPGMVWQDR DVYLQGPIWA KIPHTDGNFH PSPLMGGFGM KHPPPQILIK NTPVPADPPT | 660 |
| | | AFNKDKLNSF ITQYSTGQVS VEIEWELQKE NSKRWNPEIQ YTSNYYKSNN VEFAVNTEGV | 720 |
| | | YSEPRPIGTR YLTRNL (SEQ ID NO: 67) | |
| AAVrh. | 498_NNN/ | MAADGYLPDW LEDNLSEGIR EWWDLKPGAP KPKANQQKQD DGRGLVLPGY | 50 |
| 10.LD | AAA_500 | KYLGPFNGLD KGEPVNAADA AALEHDKAYD QQLKAGDNPY LRYNHADAEF | 100 |
| | | QERLQEDTSF GGNLGRAVFQ AKKRVLEPLG LVEEGAKTAP GKKRPVEPSP | 150 |
| | | QRSPDSSTGI GKKGQQPAKK RLNFGQTGDS ESVPDPQPIG EPPAGPSGLG | 200 |
| | | SGTMAAGGGA PMADNNEGAD GVGSSSGNWH CDSTWLGDRV ITTSTRTWAL | 250 |
| | | PTYNNHLYKQ ISNGTSGGST NDNTYFGYST PWGYFDFNRF HCHFSPRDWQ | 300 |
| | | RLINNNWGFR PKRLNFKLFN IQVKEVTQNE GTKTIANNLT STIQVFTDSE | 350 |
| | | YQLPYVLGSA HQGCLPPFPA DVFMIPQYGY LTLNNGSQAV GRSSFYCLEY | 400 |
| | | FPSQMLRTGN NFEFSYQFED VPFHSSYAHS QSLDRLMNPL IDQYLYYLSR | 450 |
| | | TQSTGGTAGT QQLLFSQAGP NNMSAQAKNW LPGPCYRQQR [chemical structure] | 500 |
| | | SNFAWTGATK YHLNGRDSLV NPGVAMATHK DDEERFFPSS GVLMFGKQGA | 550 |
| | | GKDNVDYSSV MLTSEEEIKT TNPVATEQYG VVADNLQQQN AAPIVGAVNS | 600 |
| | | QGALPGMVWQ NRDVYLQGPI WAKIPHTDGN FHPSPLMGGF GLKHPPPQIL | 650 |
| | | IKNTPVPADP PTTFSQAKLA SFITQYSTGQ VSVEIEWELQ KENSKRWNPE | 700 |
| | | IQYTSNYYKS TNVDFAVNTD GTYSEPRPIG TRYLTRNL (SEQ ID NO: 68) | |
| AAV9.4 | 498_NNN/ | MAADGYLPDW LEDNLSEGIR EWWALKPGAP QPKANQQHQD NARGLVLPGY KYLGPGNGLD | 60 |
| 96NNN/ | AAA_500 | KGEPVNAADA AALEHDKAYD QQLKAGDNPY LKYNHADAEF QERLKEDTSF GGNLGRAVFQ | 120 |
| AAA498 | | AKKRLLEPLG LVEEAAKTAP GKKRPVEQSP QEPDSSAGIG KSGAQPAKKR LNFGQTGDTE | 180 |
| | | SVPDPQPIGE PPAAPSGVGS LTMASGGGAP VADNNEGADG VGSSSGNWHC DSQWLGDRVI | 240 |
| | | TTSTRTWALP TYNNHLYKQI SNSTSGGSSN DNAYFGYSTP WGYFDFNRFH CHFSPRDWQR | 300 |
| | | LINNNWGFRP KRLNFKLFNI QVKEVTDNNG VKTIANNLTS TVQVFTDSDY QLPYVLGSAH | 360 |
| | | EGCLPPFPAD VFMIPQYGYL TLNDGSQAVG RSSFYCLEYF PSQMLRTGNN FQFSYEFENV | 420 |
| | | PFHSSYAHSQ SLDRLMNPLI DQYLYYLSKT INGSGQNQQT LKFSVAGPSN MAVQGRNYIP | 480 |
| | | GPSYRQQRVS [chemical structure] FAWPGASSWA LNGRNSLMNP GPAMASHKEG EDRFFPLSGS | 540 |
| | | LIFGKQGTGR DNVDADKVMI TNEEEIKTTN PVATESYGQV ATNHQSAQAQ AQTGWVQNQG | 600 |
| | | ILPGMVWQDR DVYLQGPIWA KIPHTDGNFH PSPLMGGFGM KHPPPQILIK NTPVPADPPT | 660 |
| | | AFNKDKLNSF ITQYSTGQVS VEIEWELQKE NSKRWNPEIQ YTSNYYKSNN VEFAVNTEGV | 720 |
| | | YSEPRPIGTR YLTRNL (SEQ ID NO: 69) | |
| AAV9.4 | 496NNN/ | MAADGYLPDW LEDNLSEGIR EWWALKPGAP QPKANQQHQD NARGLVLPGY KYLGPGNGLD | 60 |
| 96NNN/ | AAA498, | KGEPVNAADA AALEHDKAYD QQLKAGDNPY LKYNHADAEF QERLKEDTSF GGNLGRAVFQ | 120 |
| AAA498. | W503R | AKKRLLEPLG LVEEAAKTAP GKKRPVEQSP QEPDSSAGIG KSGAQPAKKR LNFGQTGDTE | 180 |
| W503R | | SVPDPQPIGE PPAAPSGVGS LTMASGGGAP VADNNEGADG VGSSSGNWHC DSQWLGDRVI | 240 |
| | | TTSTRTWALP TYNNHLYKQI SNSTSGGSSN DNAYFGYSTP WGYFDFNRFH CHFSPRDWQR | 300 |
| | | LINNNWGFRP KRLNFKLFNI QVKEVTDNNG VKTIANNLTS TVQVFTDSDY QLPYVLGSAH | 360 |
| | | EGCLPPFPAD VFMIPQYGYL TLNDGSQAVG RSSFYCLEYF PSQMLRTGNN FQFSYEFENV | 420 |
| | | PFHSSYAHSQ SLDRLMNPLI DQYLYYLSKT INGSGQNQQT LKFSVAGPSN MAVQGRNYIP | 480 |
| | | GPSYRQQRVS [chemical structure] LNGRNSLMNP GPAMASHKEG EDRFFPLSGS | 540 |
| | | LIFGKQGTGR DNVDADKVMI TNEEEIKTTN PVATESYGQV ATNHQSAQAQ AQTGWVQNQG | 600 |
| | | ILPGMVWQDR DVYLQGPIWA KIPHTDGNFH PSPLMGGFGM KHPPPQILIK NTPVPADPPT | 660 |
| | | AFNKDKLNSF ITQYSTGQVS VEIEWELQKE NSKRWNPEIQ YTSNYYKSNN VEFAVNTEGV | 720 |
| | | YSEPRPIGTR YLTRNL (SEQ ID NO: 70) | |
| AAV9 | W503R | MAADGYLPDW LEDNLSEGIR EWWALKPGAP QPKANQQHQD NARGLVLPGY KYLGPGNGLD | 60 |
| W503R | | KGEPVNAADA AALEHDKAYD QQLKAGDNPY LKYNHADAEF QERLKEDTSF GGNLGRAVFQ | 120 |
| | | AKKRLLEPLG LVEEAAKTAP GKKRPVEQSP QEPDSSAGIG KSGAQPAKKR LNFGQTGDTE | 180 |
| | | SVPDPQPIGE PPAAPSGVGS LTMASGGGAP VADNNEGADG VGSSSGNWHC DSQWLGDRVI | 240 |
| | | TTSTRTWALP TYNNHLYKQI SNSTSGGSSN DNAYFGYSTP WGYFDFNRFH CHFSPRDWQR | 300 |
| | | LINNNWGFRP KRLNFKLFNI QVKEVTDNNG VKTIANNLTS TVQVFTDSDY QLPYVLGSAH | 360 |
| | | EGCLPPFPAD VFMIPQYGYL TLNDGSQAVG RSSFYCLEYF PSQMLRTGNN FQFSYEFENV | 420 |
| | | PFHSSYAHSQ SLDRLMNPLI DQYLYYLSKT INGSGQNQQT LKFSVAGPSN MAVQGRNYIP | 480 |
| | | GPSYRQQRVS TTVTQNNNSE [chemical structure] LNGRNSLMNP GPAMASHKEG EDRFFPLSGS | 540 |
| | | LIFGKQGTGR DNVDADKVMI TNEEEIKTTN PVATESYGQV ATNHQSAQAQ AQTGWVQNQG | 600 |
| | | ILPGMVWQDR DVYLQGPIWA KIPHTDGNFH PSPLMGGFGM KHPPPQILIK NTPVPADPPT | 660 |
| | | AFNKDKLNSF ITQYSTGQVS VEIEWELQKE NSKRWNPEIQ YTSNYYKSNN VEFAVNTEGV | 720 |
| | | YSEPRPIGTR YLTRNL (SEQ ID NO: 71) | |
| AAV9 | Q474A | MAADGYLPDW LEDNLSEGIR EWWALKPGAP QPKANQQHQD NARGLVLPGY KYLGPGNGLD | 60 |
| Q474A | | KGEPVNAADA AALEHDKAYD QQLKAGDNPY LKYNHADAEF QERLKEDTSF GGNLGRAVFQ | 120 |
| | | AKKRLLEPLG LVEEAAKTAP GKKRPVEQSP QEPDSSAGIG KSGAQPAKKR LNFGQTGDTE | 180 |
| | | SVPDPQPIGE PPAAPSGVGS LTMASGGGAP VADNNEGADG VGSSSGNWHC DSQWLGDRVI | 240 |
| | | TTSTRTWALP TYNNHLYKQI SNSTSGGSSN DNAYFGYSTP WGYFDFNRFH CHFSPRDWQR | 300 |
| | | LINNNWGFRP KRLNFKLFNI QVKEVTDNNG VKTIANNLTS TVQVFTDSDY QLPYVLGSAH | 360 |
| | | EGCLPPFPAD VFMIPQYGYL TLNDGSQAVG RSSFYCLEYF PSQMLRTGNN FQFSYEFENV | 420 |
| | | PFHSSYAHSQ SLDRLMNPLI DQYLYYLSKT INGSGQNQQT LKFSVAGPSN [chemical structure] | 480 |
| | | GPSYRQQRVS TTVTQNNNSE FAWPGASSWA LNGRNSLMNP GPAMASHKEG EDRFFPLSGS | 540 |
| | | LIFGKQGTGR DNVDADKVMI TNEEEIKTTN PVATESYGQV ATNHQSAQAQ AQTGWVQNQG | 600 |
| | | ILPGMVWQDR DVYLQGPIWA KIPHTDGNFH PSPLMGGFGM KHPPPQILIK NTPVPADPPT | 660 |
| | | AFNKDKLNSF ITQYSTGQVS VEIEWELQKE NSKRWNPEIQ YTSNYYKSNN VEFAVNTEGV | 720 |
| | | YSEPRPIGTR YLTRNL (SEQ ID NO: 72) | |
| AAV9 | Bone1, | MAADGYLPDW LEDNLSEGIR EWWALKPGAP QPKANQQHQD NARGLVLPGY KYLGPGNGLD | 60 |
| S454-D8 | DDDDDD | KGEPVNAADA AALEHDKAYD QQLKAGDNPY LKYNHADAEF QERLKEDTSF GGNLGRAVFQ | 120 |
| | DD (SEQ | AKKRLLEPLG LVEEAAKTAP GKKRPVEQSP QEPDSSAGIG KSGAQPAKKR LNFGQTGDTE | 180 |
| | ID NO: 9) | SVPDPQPIGE PPAAPSGVGS LTMASGGGAP VADNNEGADG VGSSSGNWHC DSQWLGDRVI | 240 |
| | (454_455) | TTSTRTWALP TYNNHLYKQI SNSTSGGSSN DNAYFGYSTP WGYFDFNRFH CHFSPRDWQR | 300 |
| | | LINNNWGFRP KRLNFKLFNI QVKEVTDNNG VKTIANNLTS TVQVFTDSDY QLPYVLGSAH | 360 |
| | | EGCLPPFPAD VFMIPQYGYL TLNDGSQAVG RSSFYCLEYF PSQMLRTGNN FQFSYEFENV | 420 |
| | | PFHSSYAHSQ SLDRLMNPLI DQYLYYLSKT [chemical structure] SVAGPSNMAV | 481 |
| | | QGRNYIPGPS YRQQRVSTTV TQNNNSEFAW PGASSWALNG RNSLMNPGPA MASHKEGEDR | 541 |
| | | FFPLSGSLIF GKQGTGRDNV DADKVMITNE EEIKTTNPVA TESYGQVATN HQSAQAQAQT | 601 |
| | | GWVQNQGILP GMVWQDRDVY LQGPIWAKIP HTDGNFHPSP LMGGFGMKHP PPQILIKNTP | 661 |
| | | VPADPPTAFN KDKLNSFITQ YSTGQVSVEI EWELQKENSK RWNPEIQYTS NYYKSNNVEF | 721 |
| | | AVNTEGVYSE PRPIGTRYLT RNL (SEQ ID NO: 73) | |
| AAV9 | Brain1, | MAADGYLPDW LEDNLSEGIR EWWALKPGAP QPKANQQHQD NARGLVLPGY KYLGPGNGLD | 60 |
| S454- | LSSRLDA | KGEPVNAADA AALEHDKAYD QQLKAGDNPY LKYNHADAEF QERLKEDTSF GGNLGRAVFQ | 120 |
| Brain1 | (SEQ ID | AKKRLLEPLG LVEEAAKTAP GKKRPVEQSP QEPDSSAGIG KSGAQPAKKR LNFGQTGDTE | 180 |
| | NO: 10) | SVPDPQPIGE PPAAPSGVGS LTMASGGGAP VADNNEGADG VGSSSGNWHC DSQWLGDRVI | 240 |
| | (454_455) | TTSTRTWALP TYNNHLYKQI SNSTSGGSSN DNAYFGYSTP WGYFDFNRFH CHFSPRDWQR | 300 |
| | | LINNNWGFRP KRLNFKLFNI QVKEVTDNNG VKTIANNLTS TVQVFTDSDY QLPYVLGSAH | 360 |
| | | EGCLPPFPAD VFMIPQYGYL TLNDGSQAVG RSSFYCLEYF PSQMLRTGNN FQFSYEFENV | 420 |
| | | PFHSSYAHSQ SLDRLMNPLI DQYLYYLSKT [chemical structure] SVAGPSNMAV | 480 |
| | | QGRNYIPGPS YRQQRVSTTV TQNNNSEFAW PGASSWALNG RNSLMNPGPA MASHKEGEDR | 540 |
| | | FFPLSGSLIF GKQGTGRDNV DADKVMITNE EEIKTTNPVA TESYGQVATN HQSAQAQAQT | 600 |
| | | GWVQNQGILP GMVWQDRDVY LQGPIWAKIP HTDGNFHPSP LMGGFGMKHP PPQILIKNTP | 660 |
| | | VPADPPTAFN KDKLNSFITQ YSTGQVSVEI EWELQKENSK RWNPEIQYTS NYYKSNNVEF | 720 |
| | | AVNTEGVYSE PRPIGTRYLT RNL (SEQ ID NO: 74) | |
| AAV9 | Brain2/ | MAADGYLPDW LEDNLSEGIR EWWALKPGAP QPKANQQHQD NARGLVLPGY KYLGPGNGLD | 60 |
| S454- | Brain1C, | KGEPVNAADA AALEHDKAYD QQLKAGDNPY LKYNHADAEF QERLKEDTSF GGNLGRAVFQ | 120 |
| Brain2 | CLSSRLD | AKKRLLEPLG LVEEAAKTAP GKKRPVEQSP QEPDSSAGIG KSGAQPAKKR LNFGQTGDTE | 180 |
| | AC (SEQ | SVPDPQPIGE PPAAPSGVGS LTMASGGGAP VADNNEGADG VGSSSGNWHC DSQWLGDRVI | 240 |
| | ID NO: | TTSTRTWALP TYNNHLYKQI SNSTSGGSSN DNAYFGYSTP WGYFDFNRFH CHFSPRDWQR | 300 |
| | 11) | LINNNWGFRP KRLNFKLFNI QVKEVTDNNG VKTIANNLTS TVQVFTDSDY QLPYVLGSAH | 360 |
| | (454_455) | EGCLPPFPAD VFMIPQYGYL TLNDGSQAVG RSSFYCLEYF PSQMLRTGNN FQFSYEFENV | 420 |
| | | PFHSSYAHSQ SLDRLMNPLI DQYLYYLSKT [chemical structure] KFSVAGPSNM AV | 482 |
| | | QGRNYIPGPS YRQQRVSTTV TQNNNSEFAW PGASSWALNG RNSLMNPGPA MASHKEGEDR | 542 |
| | | FFPLSGSLIF GKQGTGRDNV DADKVMITNE EEIKTTNPVA TESYGQVATN HQSAQAQAQT | 602 |
| | | GWVQNQGILP GMVWQDRDVY LQGPIWAKIP HTDGNFHPSP LMGGFGMKHP PPQILIKNTP | 662 |
| | | VPADPPTAFN KDKLNSFITQ YSTGQVSVEI EWELQKENSK RWNPEIQYTS NYYKSNNVEF | 722 |
| | | AVNTEGVYSE PRPIGTRYLT RNL (SEQ ID NO: 75) | |
| AAV9 | Kidney 1, | MAADGYLPDW LEDNLSEGIR EWWALKPGAP QPKANQQHQD NARGLVLPGY KYLGPGNGLD | 60 |
| S454- | LPVAS | KGEPVNAADA AALEHDKAYD QQLKAGDNPY LKYNHADAEF QERLKEDTSF GGNLGRAVFQ | 120 |
| Kidney1 | (SEQ ID | AKKRLLEPLG LVEEAAKTAP GKKRPVEQSP QEPDSSAGIG KSGAQPAKKR LNFGQTGDTE | 180 |
| | NO: 13) | SVPDPQPIGE PPAAPSGVGS LTMASGGGAP VADNNEGADG VGSSSGNWHC DSQWLGDRVI | 240 |
| | (454_455) | TTSTRTWALP TYNNHLYKQI SNSTSGGSSN DNAYFGYSTP WGYFDFNRFH CHFSPRDWQR | 300 |
| | | LINNNWGFRP KRLNFKLFNI QVKEVTDNNG VKTIANNLTS TVQVFTDSDY QLPYVLGSAH | 360 |
| | | EGCLPPFPAD VFMIPQYGYL TLNDGSQAVG RSSFYCLEYF PSQMLRTGNN FQFSYEFENV | 420 |
| | | PFHSSYAHSQ SLDRLMNPLI DQYLYYLSKT [chemical structure] QNQQTLKFSV AGPSNMAV | 478 |
| | | QGRNYIPGPS YRQQRVSTTV TQNNNSEFAW PGASSWALNG RNSLMNPGPA MASHKEGEDR | 538 |
| | | FFPLSGSLIF GKQGTGRDNV DADKVMITNE EEIKTTNPVA TESYGQVATN HQSAQAQAQT | 598 |
| | | GWVQNQGILP GMVWQDRDVY LQGPIWAKIP HTDGNFHPSP LMGGFGMKHP PPQILIKNTP | 658 |
| | | VPADPPTAFN KDKLNSFITQ YSTGQVSVEI EWELQKENSK RWNPEIQYTS NYYKSNNVEF | 718 |
| | | AVNTEGVYSE PRPIGTRYLT RNL (SEQ ID NO: 76) | |
| AAV9 | Kidney2/ | MAADGYLPDW LEDNLSEGIR EWWALKPGAP QPKANQQHQD NARGLVLPGY KYLGPGNGLD | 60 |
| S454- | Kidney1C, | KGEPVNAADA AALEHDKAYD QQLKAGDNPY LKYNHADAEF QERLKEDTSF GGNLGRAVFQ | 120 |
| Kidney2 | CLPVASC | AKKRLLEPLG LVEEAAKTAP GKKRPVEQSP QEPDSSAGIG KSGAQPAKKR LNFGQTGDTE | 180 |
| | (SEQ ID | SVPDPQPIGE PPAAPSGVGS LTMASGGGAP VADNNEGADG VGSSSGNWHC DSQWLGDRVI | 240 |
| | NO 12) | TTSTRTWALP TYNNHLYKQI SNSTSGGSSN DNAYFGYSTP WGYFDFNRFH CHFSPRDWQR | 300 |
| | (454_455) | LINNNWGFRP KRLNFKLFNI QVKEVTDNNG VKTIANNLTS TVQVFTDSDY QLPYVLGSAH | 360 |
| | | EGCLPPFPAD VFMIPQYGYL TLNDGSQAVG RSSFYCLEYF PSQMLRTGNN FQFSYEFENV | 420 |
| | | PFHSSYAHSQ SLDRLMNPLI DQYLYYLSKT [chemical structure] SVAGPSNMAV | 480 |
| | | QGRNYIPGPS YRQQRVSTTV TQNNNSEFAW PGASSWALNG RNSLMNPGPA MASHKEGEDR | 540 |
| | | FFPLSGSLIF GKQGTGRDNV DADKVMITNE EEIKTTNPVA TESYGQVATN HQSAQAQAQT | 600 |
| | | GWVQNQGILP GMVWQDRDVY LQGPIWAKIP HTDGNFHPSP LMGGFGMKHP PPQILIKNTP | 660 |
| | | VPADPPTAFN KDKLNSFITQ YSTGQVSVEI EWELQKENSK RWNPEIQYTS NYYKSNNVEF | 720 |
| | | AVNTEGVYSE PRPIGTRYLT RNL (SEQ ID NO: 77) | |
| AAV9 | Muscle1, | MAADGYLPDW LEDNLSEGIR EWWALKPGAP QPKANQQHQD NARGLVLPGY KYLGPGNGLD | 60 |
| S454- | ASSLNIA | KGEPVNAADA AALEHDKAYD QQLKAGDNPY LKYNHADAEF QERLKEDTSF GGNLGRAVFQ | 120 |
| Muscle1 | (SEQ ID | AKKRLLEPLG LVEEAAKTAP GKKRPVEQSP QEPDSSAGIG KSGAQPAKKR LNFGQTGDTE | 180 |
| | NO: 14) | SVPDPQPIGE PPAAPSGVGS LTMASGGGAP VADNNEGADG VGSSSGNWHC DSQWLGDRVI | 240 |
| | (454_455) | TTSTRTWALP TYNNHLYKQI SNSTSGGSSN DNAYFGYSTP WGYFDFNRFH CHFSPRDWQR | 300 |
| | | LINNNWGFRP KRLNFKLFNI QVKEVTDNNG VKTIANNLTS TVQVFTDSDY QLPYVLGSAH | 360 |
| | | EGCLPPFPAD VFMIPQYGYL TLNDGSQAVG RSSFYCLEYF PSQMLRTGNN FQFSYEFENV | 420 |
| | | PFHSSYAHSQ SLDRLMNPLI DQYLYYLSKT [chemical structure] SVAGPSNMAV | 480 |
| | | QGRNYIPGPS YRQQRVSTTV TQNNNSEFAW PGASSWALNG RNSLMNPGPA MASHKEGEDR | 540 |
| | | FFPLSGSLIF GKQGTGRDNV DADKVMITNE EEIKTTNPVA TESYGQVATN HQSAQAQAQT | 600 |
| | | GWVQNQGILP GMVWQDRDVY LQGPIWAKIP HTDGNFHPSP LMGGFGMKHP PPQILIKNTP | 660 |
| | | VPADPPTAFN KDKLNSFITQ YSTGQVSVEI EWELQKENSK RWNPEIQYTS NYYKSNNVEF | 720 |
| | | AVNTEGVYSE PRPIGTRYLT RNL (SEQ ID NO: 78) | |
| AAV9 | Tfr1 | MAADGYLPDW LEDNLSEGIR EWWALKPGAP QPKANQQHQD NARGLVLPGY KYLGPGNGLD | 60 |
| S454- | HAIYPR | KGEPVNAADA AALEHDKAYD QQLKAGDNPY LKYNHADAEF QERLKEDTSF GGNLGRAVFQ | 120 |
| Tfr1 | (SEQ ID | AKKRLLEPLG LVEEAAKTAP GKKRPVEQSP QEPDSSAGIG KSGAQPAKKR LNFGQTGDTE | 180 |
| | NO: 59) | SVPDPQPIGE PPAAPSGVGS LTMASGGGAP VADNNEGADG VGSSSGNWHC DSQWLGDRVI | 240 |
| | (454_455) | TTSTRTWALP TYNNHLYKQI SNSTSGGSSN DNAYFGYSTP WGYFDFNRFH CHFSPRDWQR | 300 |
| | | LINNNWGFRP KRLNFKLFNI QVKEVTDNNG VKTIANNLTS TVQVFTDSDY QLPYVLGSAH | 360 |
| | | EGCLPPFPAD VFMIPQYGYL TLNDGSQAVG RSSFYCLEYF PSQMLRTGNN FQFSYEFENV | 420 |
| | | PFHSSYAHSQ SLDRLMNPLI DQYLYYLSKT [chemical structure] SVAGPSNMAV | 480 |
| | | QGRNYIPGPS YRQQRVSTTV TQNNNSEFAW PGASSWALNG RNSLMNPGPA MASHKEGEDR | 540 |
| | | FFPLSGSLIF GKQGTGRDNV DADKVMITNE EEIKTTNPVA TESYGQVATN HQSAQAQAQT | 600 |
| | | GWVQNQGILP GMVWQDRDVY LQGPIWAKIP HTDGNFHPSP LMGGFGMKHP PPQILIKNTP | 660 |
| | | VPADPPTAFN KDKLNSFITQ YSTGQVSVEI EWELQKENSK RWNPEIQYTS NYYKSNNVEF | 720 |
| | | AVNTEGVYSE PRPIGTRYLT RNL (SEQ ID NO: 79) | |
| AAV9 | Tfr-3, | MAADGYLPDW LEDNLSEGIR EWWALKPGAP QPKANQQHQD NARGLVLPGY KYLGPGNGLD | 60 |
| S454- | RTIGPSV | KGEPVNAADA AALEHDKAYD QQLKAGDNPY LKYNHADAEF QERLKEDTSF GGNLGRAVFQ | 120 |
| Tfr3 | (SEQ ID | AKKRLLEPLG LVEEAAKTAP GKKRPVEQSP QEPDSSAGIG KSGAQPAKKR LNFGQTGDTE | 180 |
| | NO: 19) | SVPDPQPIGE PPAAPSGVGS LTMASGGGAP VADNNEGADG VGSSSGNWHC DSQWLGDRVI | 240 |
| | (454_455) | TTSTRTWALP TYNNHLYKQI SNSTSGGSSN DNAYFGYSTP WGYFDFNRFH CHFSPRDWQR | 300 |
| | | LINNNWGFRP KRLNFKLFNI QVKEVTDNNG VKTIANNLTS TVQVFTDSDY QLPYVLGSAH | 360 |
| | | EGCLPPFPAD VFMIPQYGYL TLNDGSQAVG RSSFYCLEYF PSQMLRTGNN FQFSYEFENV | 420 |
| | | PFHSSYAHSQ SLDRLMNPLI DQYLYYLSKT [chemical structure] SVAGPSNMAV | 480 |
| | | QGRNYIPGPS YRQQRVSTTV TQNNNSEFAW PGASSWALNG RNSLMNPGPA MASHKEGEDR | 540 |
| | | FFPLSGSLIF GKQGTGRDNV DADKVMITNE EEIKTTNPVA TESYGQVATN HQSAQAQAQT | 600 |
| | | GWVQNQGILP GMVWQDRDVY LQGPIWAKIP HTDGNFHPSP LMGGFGMKHP PPQILIKNTP | 660 |
| | | VPADPPTAFN KDKLNSFITQ YSTGQVSVEI EWELQKENSK RWNPEIQYTS NYYKSNNVEF | 720 |
| | | AVNTEGVYSE PRPIGTRYLT RNL (SEQ ID NO: 80) | |
| AAV9 | Tfr4, | MAADGYLPDW LEDNLSEGIR EWWALKPGAP QPKANQQHQD NARGLVLPGY KYLGPGNGLD | 60 |
| S454- | CRTIGPS | KGEPVNAADA AALEHDKAYD QQLKAGDNPY LKYNHADAEF QERLKEDTSF GGNLGRAVFQ | 120 |
| Tfr4 | VC (SEQ | AKKRLLEPLG LVEEAAKTAP GKKRPVEQSP QEPDSSAGIG KSGAQPAKKR LNFGQTGDTE | 180 |
| (AAV9 | ID NO: | SVPDPQPIGE PPAAPSGVGS LTMASGGGAP VADNNEGADG VGSSSGNWHC DSQWLGDRVI | 240 |
| S454- | 20) | TTSTRTWALP TYNNHLYKQI SNSTSGGSSN DNAYFGYSTP WGYFDFNRFH CHFSPRDWQR | 300 |
| TfR3C) | (454_455) | LINNNWGFRP KRLNFKLFNI QVKEVTDNNG VKTIANNLTS TVQVFTDSDY QLPYVLGSAH | 360 |
| | | EGCLPPFPAD VFMIPQYGYL TLNDGSQAVG RSSFYCLEYF PSQMLRTGNN FQFSYEFENV | 420 |
| | | PFHSSYAHSQ SLDRLMNPLI DQYLYYLSKT [chemical structure] KFSVAGPSNMAV | 482 |
| | | QGRNYIPGPS YRQQRVSTTV TQNNNSEFAW PGASSWALNG RNSLMNPGPA MASHKEGEDR | 542 |
| | | FFPLSGSLIF GKQGTGRDNV DADKVMITNE EEIKTTNPVA TESYGQVATN HQSAQAQAQT | 602 |
| | | GWVQNQGILP GMVWQDRDVY LQGPIWAKIP HTDGNFHPSP LMGGFGMKHP PPQILIKNTP | 662 |
| | | VPADPPTAFN KDKLNSFITQ YSTGQVSVEI EWELQKENSK RWNPEIQYTS NYYKSNNVEF | 722 |
| | | AVNTEGVYSE PRPIGTRYLT RNL (SEQ ID NO: 81) | |
| AAV9.5 | SITLVKST | MAADGYLPDW LEDNLSEGIR EWWALKPGAP QPKANQQHQD NARGLVLPGY KYLGPGNGLD | 60 |
| 88Ad | QTV | KGEPVNAADA AALEHDKAYD QQLKAGDNPY LKYNHADAEF QERLKEDTSF GGNLGRAVFQ | 120 |
| (9 588 | (SEQ ID | AKKRLLEPLG LVEEAAKTAP GKKRPVEQSP QEPDSSAGIG KSGAQPAKKR LNFGQTGDTE | 180 |
| Ad) | NO: 21), | SVPDPQPIGE PPAAPSGVGS LTMASGGGAP VADNNEGADG VGSSSGNWHC DSQWLGDRVI | 240 |
| | DLC-AS1 | TTSTRTWALP TYNNHLYKQI SNSTSGGSSN DNAYFGYSTP WGYFDFNRFH CHFSPRDWQR | 300 |
| | (588_589) | LINNNWGFRP KRLNFKLFNI QVKEVTDNNG VKTIANNLTS TVQVFTDSDY QLPYVLGSAH | 360 |
| | | EGCLPPFPAD VFMIPQYGYL TLNDGSQAVG RSSFYCLEYF PSQMLRTGNN FQFSYEFENV | 420 |
| | | PFHSSYAHSQ SLDRLMNPLI DQYLYYLSKT INGSGQNQQT LKFSVAGPSN MAVQGRNYIP | 480 |
| | | GPSYRQQRVS [chemical structure] EFAWPGASSW ALNGRNSLMN PGPAMASHKE | 540 |
| | | GEDRFFPLSG SLIFGKQGTG RDNVDADKVM ITNEEEIKTT NPVATESYGQ VATNHQSAQA | 600 |
| | | QAQTGWVQNQ GILPGMVWQD RDVYLQGPIW AKIPHTDGNF HPSPLMGGFG MKHPPPQILI | 660 |
| | | KNTPVPADPP TAFNKDKLNS FITQYSTGQV SVEIEWELQK ENSKRWNPEI QYTSNYYKSN | 720 |
| | | NVEFAVNTEG VYSEPRPIGT RYLTRNL (SEQ ID NO: 82) | |
| AAV9.5 | TILSRSTQ | MAADGYLPDW LEDNLSEGIR EWWALKPGAP QPKANQQHQD NARGLVLPGY KYLGPGNGLD | 60 |
| 88 | TG (SEQ | KGEPVNAADA AALEHDKAYD QQLKAGDNPY LKYNHADAEF QERLKEDTSF GGNLGRAVFQ | 120 |
| Herp | ID NO: | AKKRLLEPLG LVEEAAKTAP GKKRPVEQSP QEPDSSAGIG KSGAQPAKKR LNFGQTGDTE | 180 |
| (9 588 | 22), DLC- | SVPDPQPIGE PPAAPSGVGS LTMASGGGAP VADNNEGADG VGSSSGNWHC DSQWLGDRVI | 240 |
| Hep) | AS2, | TTSTRTWALP TYNNHLYKQI SNSTSGGSSN DNAYFGYSTP WGYFDFNRFH CHFSPRDWQR | 300 |
| | 588_589 | LINNNWGFRP KRLNFKLFNI QVKEVTDNNG VKTIANNLTS TVQVFTDSDY QLPYVLGSAH | 360 |
| | | EGCLPPFPAD VFMIPQYGYL TLNDGSQAVG RSSFYCLEYF PSQMLRTGNN FQFSYEFENV | 420 |
| | | PFHSSYAHSQ SLDRLMNPLI DQYLYYLSKT INGSGQNQQT LKFSVAGPSN MAVQGRNYIP | 480 |
| | | GPSYRQQRVS [chemical structure] FAWPGASSWA LNGRNSLMNP GPAMASHKEG | 540 |
| | | EDRFFPLSGS LIFGKQGTGR DNVDADKVMI TNEEEIKTTN PVATESYGQV ATNHQSAQAQ | 600 |
| | | AQTGWVQNQG ILPGMVWQDR DVYLQGPIWA KIPHTDGNFH PSPLMGGFGM KHPPPQILIK | 660 |
| | | NTPVPADPPT AFNKDKLNSF ITQYSTGQVS VEIEWELQKE NSKRWNPEIQ YTSNYYKSNN | 720 |
| | | VEFAVNTEG VYSEPRPIGT RYLTRNL (SEQ ID NO: 83) | |
| AAVP | SITLVKST | 1 MAADGYLPDW LEDNLSEGIR EWWALKPGAP QPKANQQHQD NARGLVLPGY KYLGPGNGLD | |
| HPeB.V | QTV | 61 KGEPVNAADA AALEHDKAYD QQLKAGDNPY LKYNHADAEF QERLKEDTSF GGNLGRAVFQ | |
| P2Ad | (SEQ ID | 121 AKKRLLEPLG [chemical structure] | |
| | NO: 21), | GKKRPVEQSP QEPDSSAGIG KSGAQPAKKR LNFGQTGDTE | |
| | DLC-AS1 | 191 SVPDPQPIGE PPAAPSGVGS LTMASGGGAP VADNNEGADG VGSSSGNWHC DSQWLGDRVI | |
| | (138_139 | 251 TTSTRTWALP TYNNHLYKQI SNSTSGGSSN DNAYFGYSTP WGYFDFNRFH CHFSPRDWQR | |
| | | 311 LINNNWGFRP KRLNFKLFNI QVKEVTDNNG VKTIANNLTS TVQVFTDSDY QLPYVLGSAH | |
| | | 371 EGCLPPFPAD VFMIPQYGYL TLNDGSQAVG RSSFYCLEYF PSQMLRTGNN FQFSYEFENV | |
| | | 431 PFHSSYAHSQ SLDRLMNPLI DQYLYYLSRT INGSGQNQQT LKFSVAGPSN MAVQGRNYIP | |
| | | 491 GPSYRQQRVS TTVTQNNNSE FAWPGASSWA LNGRNSLMNP GPAMASHKEG EDRFFPLSGS | |
| | | 551 LIFGKQGTGR DNVDADKVMI TNEEEIKTTN PVATESYGQV [chemical structure] | |
| | | 611 GWVQNQGILP GMVWQDRDVY LQGPIWAKIP HTDGNFHPSP LMGGFGMKHP PPQILIKNTP | |
| | | 671 VPADPPTAFN KDKLNSFITQ YSTGQVSVEI EWELQKENSK RWNPEIQYTS NYYKSNNVEF | |
| | | 731 AVNTEGVYSE PRPIGTRYLT RNL (SEQ ID NO: 84) | |
| AAVP | TILSRSTQ | 1 MAADGYLPDW LEDNLSEGIR EWWALKPGAP QPKANQQHQD NARGLVLPGY KYLGPGNGLD | |
| HPeB.V | TG (SEQ | 61 KGEPVNAADA AALEHDKAYD QQLKAGDNPY LKYNHADAEF QERLKEDTSF GGNLGRAVFQ | |
| P2HerP | ID NO: | 121 AKKRLLEPLG [chemical structure] | |
| | 22), DLC- | PGKKRPVEQS PQEPDSSAGI GKSGAQPAKK RLNFGQTGDT E | |
| | AS2, | 192 SVPDPQPIGE PPAAPSGVGS LTMASGGGAP VADNNEGADG VGSSSGNWHC DSQWLGDRVI | |
| | (138_139) | 252 TTSTRTWALP TYNNHLYKQI SNSTSGGSSN DNAYFGYSTP WGYFDFNRFH CHFSPRDWQR | |
| | | 312 LINNNWGFRP KRLNFKLFNI QVKEVTDNNG VKTIANNLTS TVQVFTDSDY QLPYVLGSAH | |
| | | 372 EGCLPPFPAD VFMIPQYGYL TLNDGSQAVG RSSFYCLEYF PSQMLRTGNN FQFSYEFENV | |
| | | 432 PFHSSYAHSQ SLDRLMNPLI DQYLYYLSRT INGSGQNQQT LKFSVAGPSN MAVQGRNYIP | |
| | | 492 GPSYRQQRVS TTVTQNNNSE FAWPGASSWA LNGRNSLMNP GPAMASHKEG EDRFFPLSGS | |
| | | 552 LIFGKQGTGR DNVDADKVMI TNEEEIKTTN PVATESYGQV [chemical structure] | |
| | | 612 GWVQNQGILP GMVWQDRDVY LQGPIWAKIP HTDGNFHPSP LMGGFGMKHP PPQILIKNTP | |
| | | 672 VPADPPTAFN KDKLNSFITQ YSTGQVSVEI EWELQKENSK RWNPEIQYTS NYYKSNNVEF | |
| | | 732 AVNTEGVYSE PRPIGTRYLT RNL (SEQ ID NO: 85) | |

### 7. EQUIVALENTS

[0500] Although the invention is described in detail with reference to specific embodiments thereof, it will be understood that variations which are functionally equivalent are within the scope of this invention. Indeed, various modifications of the invention in addition to those shown and described herein will become apparent to those skilled in the art from the foregoing description and accompanying drawings. Such modifications are intended to fall within the scope of the appended claims. Those skilled in the art will recognize, or be able to ascertain using no more than routine experimentation, many equivalents to the specific embodiments of the invention described herein. Such equivalents are intended to be encompassed by the following claims.

[0501] All publications, patents and patent applications mentioned in this specification are herein incorporated by reference into the specification to the same extent as if each individual publication, patent or patent application was specifically and individually indicated to be incorporated herein by reference in their entireties.

[0502] The discussion herein provides a better understanding of the nature of the problems confronting the art and should not be construed in any way as an admission as to prior art nor should the citation of any reference herein be construed as an admission that such reference constitutes “prior art” to the instant application.

[0503] All references including patent applications and publications cited herein are incorporated herein by reference in their entirety and for all purposes to the same extent as if each individual publication or patent or patent application was specifically and individually indicated to be incorporated by reference in its entirety for all purposes. Many modifications and variations of this invention can be made without departing from its spirit and scope, as will be apparent to those skilled in the art. The specific embodiments described herein are offered by way of example only, and the invention is to be limited only by the terms of the appended claims, along with the full scope of equivalents to which such claims are entitled.

The application's sequence listing, which the Patent Office published only in electronic form, follows.

SEQUENCE LISTING (154 sequences)

SEQ ID NO: 1 - protein, 7 aa, Artificial Sequence
  /note="Description of Artificial Sequence: Synthetic" peptide
KMQVPFQ

SEQ ID NO: 2 - protein, 7 aa, Artificial Sequence
  /note="Description of Artificial Sequence: Synthetic" peptide
TLAAPFK

SEQ ID NO: 3 - protein, 7 aa, Artificial Sequence
  /note="Description of Artificial Sequence: Synthetic" peptide
QQAAPSF

SEQ ID NO: 4 - protein, 7 aa, Artificial Sequence
  /note="Description of Artificial Sequence: Synthetic" peptide
RYNAPFK

SEQ ID NO: 5 - protein, 7 aa, Artificial Sequence
  /note="Description of Artificial Sequence: Synthetic" peptide
LKLPPIV

SEQ ID NO: 6 - protein, 7 aa, Artificial Sequence
  /note="Description of Artificial Sequence: Synthetic" peptide
PFIKPFE

SEQ ID NO: 7 - protein, 7 aa, Artificial Sequence
  /note="Description of Artificial Sequence: Synthetic" peptide
TLSLPWK

SEQ ID NO: 8 - protein, 11 aa, Artificial Sequence
  /note="Description of Artificial Sequence: Synthetic" peptide
QEQLERALNSS

SEQ ID NO: 9 - protein, 8 aa, Artificial Sequence
  /note="Description of Artificial Sequence: Synthetic" peptide
DDDDDDDD

SEQ ID NO: 10 - protein, 7 aa, Artificial Sequence
  /note="Description of Artificial Sequence: Synthetic" peptide
LSSRLDA

SEQ ID NO: 11 - protein, 9 aa, Artificial Sequence
  /note="Description of Artificial Sequence: Synthetic" peptide
CLSSRLDAC

SEQ ID NO: 12 - protein, 7 aa, Artificial Sequence
  /note="Description of Artificial Sequence: Synthetic" peptide
CLPVASC

SEQ ID NO: 13 - protein, 5 aa, Artificial Sequence
  /note="Description of Artificial Sequence: Synthetic" peptide
LPVAS

SEQ ID NO: 14 - protein, 7 aa, Artificial Sequence
  /note="Description of Artificial Sequence: Synthetic" peptide
ASSLNIA

SEQ ID NO: 15 - protein, 7 aa, Artificial Sequence
  /note="Description of Artificial Sequence: Synthetic" peptide
LGETTRP

SEQ ID NO: 16 - protein, 9 aa, Artificial Sequence
  /note="Description of Artificial Sequence: Synthetic" peptide
LALGETTRP

SEQ ID NO: 17 - protein, 7 aa, Artificial Sequence
  /note="Description of Artificial Sequence: Synthetic" peptide
HAIYPRH

SEQ ID NO: 18 - protein, 12 aa, Artificial Sequence
  /note="Description of Artificial Sequence: Synthetic" peptide
THRPPMWSPVWP

SEQ ID NO: 19 - protein, 7 aa, Artificial Sequence
  /note="Description of Artificial Sequence: Synthetic" peptide
RTIGPSV

SEQ ID NO: 20 - protein, 9 aa, Artificial Sequence
  /note="Description of Artificial Sequence: Synthetic" peptide
CRTIGPSVC

SEQ ID NO: 21 - protein, 11 aa, Artificial Sequence
  /note="Description of Artificial Sequence: Synthetic" peptide
SITLVKSTQTV

SEQ ID NO: 22 - protein, 10 aa, Artificial Sequence
  /note="Description of Artificial Sequence: Synthetic" peptide
TILSRSTQTG

SEQ ID NO: 23 - protein, 7 aa, Artificial Sequence
  /note="Description of Artificial Sequence: Synthetic" peptide
QAVRTSL

SEQ ID NO: 24 - protein, 7 aa, Artificial Sequence
  /note="Description of Artificial Sequence: Synthetic" peptide
QAVRTSH

SEQ ID NO: 25 - protein, 20 aa, Artificial Sequence
  /note="Description of Artificial Sequence: Synthetic" peptide
VVMVGEKPITITQHSVETEG

SEQ ID NO: 26 - protein, 12 aa, Artificial Sequence
  /note="Description of Artificial Sequence: Synthetic" peptide
RSSEEDKSTQTT

SEQ ID NO: 27 - protein, 7 aa, Artificial Sequence
  /note="Description of Artificial Sequence: Synthetic" peptide
TLAVPFK

SEQ ID NO: 28 - protein, 7 aa, Artificial Sequence
  /note="Description of Artificial Sequence: Synthetic" peptide
SIGYPLP

SEQ ID NO: 29 - protein, 9 aa, Artificial Sequence
  /note="Description of Artificial Sequence: Synthetic" peptide
CDCRGDCFC

SEQ ID NO: 30 - protein, 6 aa, Artificial Sequence
  /note="Description of Artificial Sequence: Synthetic" peptide
NGRAHA

SEQ ID NO: 31 - protein, 13 aa, Artificial Sequence
  /note="Description of Artificial Sequence: Synthetic" peptide
CGFERVRQCPERC

SEQ ID NO: 32 - protein, 8 aa, Artificial Sequence
  /note="Description of Artificial Sequence: Synthetic" peptide
CGFELETC

SEQ ID NO: 33 - protein, 13 aa, Artificial Sequence
  /note="Description of Artificial Sequence: Synthetic" peptide
CVALCREACGEGC

SEQ ID NO: 34 - protein, 9 aa, Artificial Sequence
  /note="Description of Artificial Sequence: Synthetic" peptide
SWCEPGWCR

SEQ ID NO: 35 - protein, 7 aa, Artificial Sequence
  /note="Description of Artificial Sequence: Synthetic" peptide
YSGKWGW

SEQ ID NO: 36 - protein, 7 aa, Artificial Sequence
  /note="Description of Artificial Sequence: Synthetic" peptide
GSLGGRS

SEQ ID NO: 37 - protein, 7 aa, Artificial Sequence
  /note="Description of Artificial Sequence: Synthetic" peptide
LMLPRAD

SEQ ID NO: 38 - protein, 9 aa, Artificial Sequence
  /note="Description of Artificial Sequence: Synthetic" peptide
CKCCRAKDC

SEQ ID NO: 39 - protein, 7 aa, Artificial Sequence
  /note="Description of Artificial Sequence: Synthetic" peptide
SMSIARL

SEQ ID NO: 40 - protein, 5 aa, Artificial Sequence
  /note="Description of Artificial Sequence: Synthetic" peptide
CRPPR

SEQ ID NO: 41 - protein, 6 aa, Artificial Sequence
  /note="Description of Artificial Sequence: Synthetic" peptide
CKRAVR

SEQ ID NO: 42 - protein, 9 aa, Artificial Sequence
  /note="Description of Artificial Sequence: Synthetic" peptide
CPKTRRVPC

SEQ ID NO: 43 - protein, 9 aa, Artificial Sequence
  /note="Description of Artificial Sequence: Synthetic" peptide
CRSTRANPC

SEQ ID NO: 44 - protein, 6 aa, Artificial Sequence
  /note="Description of Artificial Sequence: Synthetic" peptide
CARPAR

SEQ ID NO: 45 - protein, 9 aa, Artificial Sequence
  /note="Description of Artificial Sequence: Synthetic" peptide
CPGPEGAGC

SEQ ID NO: 46 - protein, 11 aa, Artificial Sequence
  /note="Description of Artificial Sequence: Synthetic" peptide
KSTEDKSTQTP

SEQ ID NO: 47 - protein, 11 aa, Artificial Sequence
  /note="Description of Artificial Sequence: Synthetic" peptide
LGHFTRSTQTS

SEQ ID NO: 48 - protein, 11 aa, Artificial Sequence
  /note="Description of Artificial Sequence: Synthetic" peptide
GVQMAKSTQTF

SEQ ID NO: 49 - protein, 11 aa, Artificial Sequence
  /note="Description of Artificial Sequence: Synthetic" peptide
PKTRNSQTQTD

SEQ ID NO: 50 - protein, 11 aa, Artificial Sequence
  /note="Description of Artificial Sequence: Synthetic" peptide
VTTQNTASQTM

SEQ ID NO: 51 - protein, 13 aa, Artificial Sequence
  /note="Description of Artificial Sequence: Synthetic" peptide
KSSQDKSTQTTGD

SEQ ID NO: 52 - protein, 8 aa, Artificial Sequence
  /note="Description of Artificial Sequence: Synthetic" peptide
DYKDDDDK

SEQ ID NO: 53 - protein, 7 aa, Artificial Sequence
  /note="Description of Artificial Sequence: Synthetic" peptide
TLAGPFK

SEQ ID NO: 54 - protein, 11 aa, Artificial Sequence
  /note="Description of Artificial Sequence: Synthetic" peptide
CITLVKSTQTV

SEQ ID NO: 55 - protein, 4 aa, Artificial Sequence
  /note="Description of Artificial Sequence: Synthetic" peptide
STQT

SEQ ID NO: 56 - protein, 5 aa, Artificial Sequence
  /note="Description of Artificial Sequence: Synthetic" peptide
KSTQT

SEQ ID NO: 57 - protein, 6 aa, Artificial Sequence
  /note="Description of Artificial Sequence: Synthetic" peptide
DDDDDD

SEQ ID NO: 58 - protein, 6 aa, Adeno-associated virus
QAQAQT

SEQ ID NO: 59 - protein, 6 aa, Artificial Sequence
  /note="Description of Artificial Sequence: Synthetic" peptide
HAIYPR

SEQ ID NO: 60 - protein, 743 aa, Artificial Sequence
  /note="Description of Artificial Sequence: Synthetic" polypeptide
MAADGYLPDWLEDNLSEGIREWWALKPGAPQPKANQQHQDNARGLVLPGYKYLGPGNGLDKGEPVNAADAAALEHDKAYDQQLKAGDNPYLKYNHADAEFQERLKEDTSFGGNLGRAVFQAKKRLLEPLGLVEEAAKTAPGKKRPVEQSPQEPDSSAGIGKSGAQPAKKRLNFGQTGDTESVPDPQPIGEPPAAPSGVGSLTMASGGGAPVADNNEGADGVGSSSGNWHCDSQWLGDRVITTSTRTWALPTYNNHLYKQISNSTSGGSSNDNAYFGYSTPWGYFDFNRFHCHFSPRDWQRLINNNWGFRPKRLNFKLFNIQVKEVTDNNGVKTIANNLTSTVQVFTDSDYQLPYVLGSAHEGCLPPFPADVFMIPQYGYLTLNDGSQAVGRSSFYCLEYFPSQMLRTGNNFQFSYEFENVPFHSSYAHSQSLDRLMNPLIDQYLYYLSRTINGSGQNQQTLKFSVAGPSNMAVQGRNYIPGPSYRQQRVSTTVTQNNNSEFAWPGASSWALNGRNSLMNPGPAMASHKEGEDRFFPLSGSLIFGKQGTGRDNVDADKVMITNEEEIKTTNPVATESYGQVATNHQSAQQAVRTSLAQAQTGWVQNQGILPGMVWQDRDVYLQGPIWAKIPHTDGNFHPSPLMGGFGMKHPPPQILIKNTPVPADPPTAFNKDKLNSFITQYSTGQVSVEIEWELQKENSKRWNPEIQYTSNYYKSNNVEFAVNTEGVYSEPRPIGTRYLTRNL

SEQ ID NO: 61 - protein, 743 aa, Artificial Sequence
  /note="Description of Artificial Sequence: Synthetic" polypeptide
MAADGYLPDWLEDNLSEGIREWWALKPGAPQPKANQQHQDNARGLVLPGYKYLGPGNGLDKGEPVNAADAAALEHDKAYDQQLKAGDNPYLKYNHADAEFQERLKEDTSFGGNLGRAVFQAKKRLLEPLGLVEEAAKTAPGKKRPVEQSPQEPDSSAGIGKSGAQPAKKRLNFGQTGDTESVPDPQPIGEPPAAPSGVGSLTMASGGGAPVADNNEGADGVGSSSGNWHCDSQWLGDRVITTSTRTWALPTYNNHLYKQISNSTSGGSSNDNAYFGYSTPWGYFDFNRFHCHFSPRDWQRLINNNWGFRPKRLNFKLFNIQVKEVTDNNGVKTIANNLTSTVQVFTDSDYQLPYVLGSAHEGCLPPFPADVFMIPQYGYLTLNDGSQAVGRSSFYCLEYFPSQMLRTGNNFQFSYEFENVPFHSSYAHSQSLDRLMNPLIDQYLYYLSRTINGSGQNQQTLKFSVAGPSNMAVQGRNYIPGPSYRQQRVSTTVTQNNNSEFAWPGASSWALNGRNSLMNPGPAMASHKEGEDRFFPLSGSLIFGKQGTGRDNVDADKVMITNEEEIKTTNPVATESYGQVATNHQSAQQAVRTSHAQAQTGWVQNQGILPGMVWQDRDVYLQGPIWAKIPHTDGNFHPSPLMGGFGMKHPPPQILIKNTPVPADPPTAFNKDKLNSFITQYSTGQVSVEIEWELQKENSKRWNPEIQYTSNYYKSNNVEFAVNTEGVYSEPRPIGTRYLTRNL

SEQ ID NO: 62 - protein, 743 aa, Artificial Sequence
  /note="Description of Artificial Sequence: Synthetic" polypeptide
MAADGYLPDWLEDNLSEGIREWWALKPGAPQPKANQQHQDNARGLVLPGYKYLGPGNGLDKGEPVNAADAAALEHDKAYDQQLKAGDNPYLKYNHADAEFQERLKEDTSFGGNLGRAVFQAKKRLLEPLGLVEEAAKTAPGKKRPVEQSPQEPDSSAGIGKSGAQPAKKRLNFGQTGDTESVPDPQPIGEPPAAPSGVGSLTMASGGGAPVADNNEGADGVGSSSGNWHCDSQWLGDRVITTSTRTWALPTYNNHLYKQISNSTSGGSSNDNAYFGYSTPWGYFDFNRFHCHFSPRDWQRLINNNWGFRPKRLNFKLFNIQVKEVTDNNGVKTIANNLTSTVQVFTDSDYQLPYVLGSAHEGCLPPFPADVFMIPQYGYLTLNDGSQAVGRSSFYCLEYFPSQMLRTGNNFQFSYEFENVPFHSSYAHSQSLDRLMNPLIDQYLYYLSRTINGSGQNQQTLKFSVAGPSNMAVQGRNYIPGPSYRQQRVSTTVTQNNNSEFAWPGASSWALNGRNSLMNPGPAMASHKEGEDRFFPLSGSLIFGKQGTGRDNVDADKVMITNEEEIKTTNPVATESYGQVATNHQSAQTLAVPFKAQAQTGWVQNQGILPGMVWQDRDVYLQGPIWAKIPHTDGNFHPSPLMGGFGMKHPPPQILIKNTPVPADPPTAFNKDKLNSFITQYSTGQVSVEIEWELQKENSKRWNPEIQYTSNYYKSNNVEFAVNTEGVYSEPRPIGTRYLTRNL

SEQ ID NO: 63 - protein, 743 aa, Artificial Sequence
  /note="Description of Artificial Sequence: Synthetic" polypeptide
MAADGYLPDWLEDNLSEGIREWWALKPGAPQPKANQQHQDNARGLVLPGYKYLGPGNGLDKGEPVNAADAAALEHDKAYDQQLKAGDNPYLKYNHADAEFQERLKEDTSFGGNLGRAVFQAKKRLLEPLGLVEEAAKTAPGKKRPVEQSPQEPDSSAGIGKSGAQPAKKRLNFGQTGDTESVPDPQPIGEPPAAPSGVGSLTMASGGGAPVADNNEGADGVGSSSGNWHCDSQWLGDRVITTSTRTWALPTYNNHLYKQISNSTSGGSSNDNAYFGYSTPWGYFDFNRFHCHFSPRDWQRLINNNWGFRPKRLNFKLFNIQVKEVTDNNGVKTIANNLTSTVQVFTDSDYQLPYVLGSAHEGCLPPFPADVFMIPQYGYLTLNDGSQAVGRSSFYCLEYFPSQMLRTGNNFQFSYEFENVPFHSSYAHSQSLDRLMNPLIDQYLYYLSRTINGSGQNQQTLKFSVAGPSNMAVQGRNYIPGPSYRQQRVSTTVTQNNNSEFAWPGASSWALNGRNSLMNPGPAMASHKEGEDRFFPLSGSLIFGKQGTGRDNVDADKVMITNEEEIKTTNPVATESYGQVATNHQSDGTLAVPFKAQAQTGWVQNQGILPGMVWQDRDVYLQGPIWAKIPHTDGNFHPSPLMGGFGMKHPPPQILIKNTPVPADPPTAFNKDKLNSFITQYSTGQVSVEIEWELQKENSKRWNPEIQYTSNYYKSNNVEFAVNTEGVYSEPRPIGTRYLTRNL

SEQ ID NO: 64 - protein, 738 aa, Artificial Sequence
  /note="Description of Artificial Sequence: Synthetic" polypeptide
MAADGYLPDWLEDNLSEGIREWWALKPGAPKPKANQQKQDDGRGLVLPGYKYLGPFNGLDKGEPVNAADAAALEHDKAYDQQLQAGDNPYLRYNHADAEFQERLQEDTSFGGNLGRAVFQAKKRVLEPLGLVEEGAKTAPGKKRPVEPSPQRSPDSSTGIGKKGQQPARKRLNFGQTGDSESVPDPQPLGEPPAAPSGVGPNTMAAGGGAPMADNNEGADGVGSSSGNWHCDSTWLGDRVITTSTRTWALPTYNNHLYKQISNGTSGGSTNDNTYFGYSTPWGYFDFNRFHCHFSPRDWQRLINNNWGFRPKRLSFKLFNIQVKEVTQNEGTKTIANNLTSTIQVFTDSEYQLPYVLGSAHQGCLPPFPADVFMIPQYGYLTLNNGSQAVGRSSFYCLEYFPSQMLRTGNNFQFTYTFEDVPFHSSYAHSQSLDRLMNPLIDQYLYYLSRTQTTGGTANTQTLGFSQGGPNTMANQAKNWLPGPCYRQQRVSTTTGQNNNSNFAWTAGTKYHLNGRNSLANPGIAMATHKDDEERFFPSNGILIFGKQNAARDNADYSDVMLTSEEEIKTTNPVATEEYGIVADNLQQQNTAPQIGTVNSQGALPGMVWQNRDVYLQGPIWAKIPHTDGNFHPSPLMGGFGLKHPPPQILIKNTPVPADPPTTFNQSKLNSFITQYSTGQVSVEIEWELQKENSKRWNPEIQYTSNYYKSTSVDFAVNTEGVYSEPRPIGTRYLTRNL

SEQ ID NO: 65 - protein, 738 aa, Artificial Sequence
  /note="Description of Artificial Sequence: Synthetic" polypeptide
MAADGYLPDWLEDNLSEGIREWWALKPGAPKPKANQQKQDDGRGLVLPGYKYLGPFNGLDKGEPVNAADAAALEHDKAYDQQLQAGDNPYLRYNHADAEFQERLQEDTSFGGNLGRAVFQAKKRVLEPLGLVEEGAKTAPGKKRPVEPSPQRSPDSSTGIGKKGQQPARKRLNFGQTGDSESVPDPQPLGEPPAAPSGVGPNTMAAGGGAPMADNNEGADGVGSSSGNWHCDSTWLGDRVITTSTRTWALPTYNNHLYKQISNGTSGGSTNDNTYFGYSTPWGYFDFNRFHCHFSPRDWQRLINNNWGFRPKRLSFKLFNIQVKEVTQNEGTKTIANNLTSTIQVFTDSEYQLPYVLGSAHQGCLPPFPADVFMIPQYGYLTLNNGSQAVGRSSFYCLEYFPSQMLRTGNNFQFTYTFEDVPFHSSYAHSQSLDRLMNPLIDQYLYYLSRTQTTGGTANTQTLGFSQGGPNTMANQAKNWLPGPCYRQQRVSTTTGQAAASNFAWTAGTKYHLNGRNSLANPGIAMATHKDDEERFFPSNGILIFGKQNAARDNADYSDVMLTSEEEIKTTNPVATEEYGIVADNLQQQNTAPQIGTVNSQGALPGMVWQNRDVYLQGPIWAKIPHTDGNFHPSPLMGGFGLKHPPPQILIKNTPVPADPPTTFNQSKLNSFITQYSTGQVSVEIEWELQKENSKRWNPEIQYTSNYYKSTSVDFAVNTEGVYSEPRPIGTRYLTRNL

SEQ ID NO: 66 - protein, 736 aa, Artificial Sequence
  /note="Description of Artificial Sequence: Synthetic" polypeptide
MAADGYLPDWLEDNLSEGIREWWALKPGAPQPKANQQHQDNARGLVLPGYKYLGPGNGLDKGEPVNAADAAALEHDKAYDQQLKAGDNPYLKYNHADAEFQERLKEDTSFGGNLGRAVFQAKKRLLEPLGLVEEAAKTAPGKKRPVEQSPQEPDSSAGIGKSGAQPAKKRLNFGQTGDTESVPDPQPIGEPPAAPSGVGSLTMASGGGAPVADNNEGADGVGSSSGNWHCDSQWLGDRVITTSTRTWALPTYNNHLYKQISNGTSGGSTNDNTYFGYSTPWGYFDFNRFHCHFSPRDWQRLINNNWGFRPKRLNFKLFNIQVKEVTDNNGVKTIANNLTSTVQVFTDSDYQLPYVLGSAHEGCLPPFPADVFMIPQYGYLTLNDGSQAVGRSSFYCLEYFPSQMLRTGNNFQFSYEFENVPFHSSYAHSQSLDRLMNPLIDQYLYYLSKTINGSGQNQQTLKFSVAGPSNMAVQGRNYIPGPSYRQQRVSTTVTQNNNSEFAWPGASSWALNGRNSLMNPGPAMASHKEGEDRFFPLSGSLIFGKQGTGRDNVDADKVMITNEEEIKTTNPVATESYGQVATNHQSAQAQAQTGWVQNQGILPGMVWQDRDVYLQGPIWAKIPHTDGNFHPSPLMGGFGMKHPPPQILIKNTPVPADPPTAFNKDKLNSFITQYSTGQVSVEIEWELQKENSKRWNPEIQYTSNYYKSNNVEFAVNTEGVYSEPRPIGTRYLTRNL

SEQ ID NO: 67 - protein, 736 aa, Artificial Sequence
  /note="Description of Artificial Sequence: Synthetic" polypeptide
MAADGYLPDWLEDNLSEGIREWWALKPGAPQPKANQQHQDNARGLVLPGYKYLGPGNGLDKGEPVNAADAAALEHDKAYDQQLKAGDNPYLKYNHADAEFQERLKEDTSFGGNLGRAVFQAKKRLLEPLGLVEEAAKTAPGKKRPVEQSPQEPDSSAGIGKSGAQPAKKRLNFGQTGDTESVPDPQPIGEPPAAPSGVGSLTMASGGGAPVADNNEGADGVGSSSGNWHCDSQWLGDRVITTSTRTWALPTYNNHLYKQISNGTSGGSTNDNTYFGYSTPWGYFDFNRFHCHFSPRDWQRLINNNWGFRPKRLNFKLFNIQVKEVTDNNGVKTIANNLTSTVQVFTDSDYQLPYVLGSAHEGCLPPFPADVFMIPQYGYLTLNDGSQAVGRSSFYCLEYFPSQMLRTGNNFQFSYEFENVPFHSSYAHSQSLDRLMNPLIDQYLYYLSKTINGSGQNQQTLKFSVAGPSNMAVQGRNYIPGPSYRQQRVSTTVTQAAASEFAWPGASSWALNGRNSLMNPGPAMASHKEGEDRFFPLSGSLIFGKQGTGRDNVDADKVMITNEEEIKTTNPVATESYGQVATNHQSAQAQAQTGWVQNQGILPGMVWQDRDVYLQGPIWAKIPHTDGNFHPSPLMGGFGMKHPPPQILIKNTPVPADPPTAFNKDKLNSFITQYSTGQVSVEIEWELQKENSKRWNPEIQYTSNYYKSNNVEFAVNTEGVYSEPRPIGTRYLTRNL

SEQ ID NO: 68 - protein, 738 aa, Artificial Sequence
  /note="Description of Artificial Sequence: Synthetic" polypeptide
MAADGYLPDWLEDNLSEGIREWWDLKPGAPKPKANQQKQDDGRGLVLPGYKYLGPFNGLDKGEPVNAADAAALEHDKAYDQQLKAGDNPYLRYNHADAEFQERLQEDTSFGGNLGRAVFQAKKRVLEPLGLVEEGAKTAPGKKRPVEPSPQRSPDSSTGIGKKGQQPAKKRLNFGQTGDSESVPDPQPIGEPPAGPSGLGSGTMAAGGGAPMADNNEGADGVGSSSGNWHCDSTWLGDRVITTSTRTWALPTYNNHLYKQISNGTSGGSTNDNTYFGYSTPWGYFDFNRFHCHFSPRDWQRLINNNWGFRPKRLNFKLFNIQVKEVTQNEGTKTIANNLTSTIQVFTDSEYQLPYVLGSAHQGCLPPFPADVFMIPQYGYLTLNNGSQAVGRSSFYCLEYFPSQMLRTGNNFEFSYQFEDVPFHSSYAHSQSLDRLMNPLIDQYLYYLSRTQSTGGTAGTQQLLFSQAGPNNMSAQAKNWLPGPCYRQQRVSTTLSQAAASNFAWTGATKYHLNGRDSLVNPGVAMATHKDDEERFFPSSGVLMFGKQGAGKDNVDYSSVMLTSEEEIKTTNPVATEQYGVVADNLQQQNAAPIVGAVNSQGALPGMVWQNRDVYLQGPIWAKIPHTDGNFHPSPLMGGFGLKHPPPQILIKNTPVPADPPTTFSQAKLASFITQYSTGQVSVEIEWELQKENSKRWNPEIQYTSNYYKSTNVDFAVNTDGTYSEPRPIGTRYLTRNL

SEQ ID NO: 69 - protein, 736 aa, Artificial Sequence
  /note="Description of Artificial Sequence: Synthetic" polypeptide
MAADGYLPDWLEDNLSEGIREWWALKPGAPQPKANQQHQDNARGLVLPGYKYLGPGNGLDKGEPVNAADAAALEHDKAYDQQLKAGDNPYLKYNHADAEFQERLKEDTSFGGNLGRAVFQAKKRLLEPLGLVEEAAKTAPGKKRPVEQSPQEPDSSAGIGKSGAQPAKKRLNFGQTGDTESVPDPQPIGEPPAAPSGVGSLTMASGGGAPVADNNEGADGVGSSSGNWHCDSQWLGDRVITTSTRTWALPTYNNHLYKQISNSTSGGSSNDNAYFGYSTPWGYFDFNRFHCHFSPRDWQRLINNNWGFRPKRLNFKLFNIQVKEVTDNNGVKTIANNLTSTVQVFTDSDYQLPYVLGSAHEGCLPPFPADVFMIPQYGYLTLNDGSQAVGRSSFYCLEYFPSQMLRTGNNFQFSYEFENVPFHSSYAHSQSLDRLMNPLIDQYLYYLSKTINGSGQNQQTLKFSVAGPSNMAVQGRNYIPGPSYRQQRVSTTVTQAAASEFAWPGASSWALNGRNSLMNPGPAMASHKEGEDRFFPLSGSLIFGKQGTGRDNVDADKVMITNEEEIKTTNPVATESYGQVATNHQSAQAQAQTGWVQNQGILPGMVWQDRDVYLQGPIWAKIPHTDGNFHPSPLMGGFGMKHPPPQILIKNTPVPADPPTAFNKDKLNSFITQYSTGQVSVEIEWELQKENSKRWNPEIQYTSNYYKSNNVEFAVNTEGVYSEPRPIGTRYLTRNL

SEQ ID NO: 70 - protein, 736 aa, Artificial Sequence
  /note="Description of Artificial Sequence: Synthetic" polypeptide
MAADGYLPDWLEDNLSEGIREWWALKPGAPQPKANQQHQDNARGLVLPGYKYLGPGNGLDKGEPVNAADAAALEHDKAYDQQLKAGDNPYLKYNHADAEFQERLKEDTSFGGNLGRAVFQAKKRLLEPLGLVEEAAKTAPGKKRPVEQSPQEPDSSAGIGKSGAQPAKKRLNFGQTGDTESVPDPQPIGEPPAAPSGVGSLTMASGGGAPVADNNEGADGVGSSSGNWHCDSQWLGDRVITTSTRTWALPTYNNHLYKQISNSTSGGSSNDNAYFGYSTPWGYFDFNRFHCHFSPRDWQRLINNNWGFRPKRLNFKLFNIQVKEVTDNNGVKTIANNLTSTVQVFTDSDYQLPYVLGSAHEGCLPPFPADVFMIPQYGYLTLNDGSQAVGRSSFYCLEYFPSQMLRTGNNFQFSYEFENVPFHSSYAHSQSLDRLMNPLIDQYLYYLSKTINGSGQNQQTLKFSVAGPSNMAVQGRNYIPGPSYRQQRVSTTVTQAAASEFARPGASSWALNGRNSLMNPGPAMASHKEGEDRFFPLSGSLIFGKQGTGRDNVDADKVMITNEEEIKTTNPVATESYGQVATNHQSAQAQAQTGWVQNQGILPGMVWQDRDVYLQGPIWAKIPHTDGNFHPSPLMGGFGMKHPPPQILIKNTPVPADPPTAFNKDKLNSFITQYSTGQVSVEIEWELQKENSKRWNPEIQYTSNYYKSNNVEFAVNTEGVYSEPRPIGTRYLTRNL

SEQ ID NO: 71 - protein, 736 aa, Artificial Sequence
  /note="Description of Artificial Sequence: Synthetic" polypeptide
MAADGYLPDWLEDNLSEGIREWWALKPGAPQPKANQQHQDNARGLVLPGYKYLGPGNGLDKGEPVNAADAAALEHDKAYDQQLKAGDNPYLKYNHADAEFQERLKEDTSFGGNLGRAVFQAKKRLLEPLGLVEEAAKTAPGKKRPVEQSPQEPDSSAGIGKSGAQPAKKRLNFGQTGDTESVPDPQPIGEPPAAPSGVGSLTMASGGGAPVADNNEGADGVGSSSGNWHCDSQWLGDRVITTSTRTWALPTYNNHLYKQISNSTSGGSSNDNAYFGYSTPWGYFDFNRFHCHFSPRDWQRLINNNWGFRPKRLNFKLFNIQVKEVTDNNGVKTIANNLTSTVQVFTDSDYQLPYVLGSAHEGCLPPFPADVFMIPQYGYLTLNDGSQAVGRSSFYCLEYFPSQMLRTGNNFQFSYEFENVPFHSSYAHSQSLDRLMNPLIDQYLYYLSKTINGSGQNQQTLKFSVAGPSNMAVQGRNYIPGPSYRQQRVSTTVTQNNNSEFARPGASSWALNGRNSLMNPGPAMASHKEGEDRFFPLSGSLIFGKQGTGRDNVDADKVMITNEEEIKTTNPVATESYGQVATNHQSAQAQAQTGWVQNQGILPGMVWQDRDVYLQGPIWAKIPHTDGNFHPSPLMGGFGMKHPPPQILIKNTPVPADPPTAFNKDKLNSFITQYSTGQVSVEIEWELQKENSKRWNPEIQYTSNYYKSNNVEFAVNTEGVYSEPRPIGTRYLTRNL

SEQ ID NO: 72 - protein, 736 aa, Artificial Sequence
  /note="Description of Artificial Sequence: Synthetic" polypeptide
MAADGYLPDWLEDNLSEGIREWWALKPGAPQPKANQQHQDNARGLVLPGYKYLGPGNGLDKGEPVNAADAAALEHDKAYDQQLKAGDNPYLKYNHADAEFQERLKEDTSFGGNLGRAVFQAKKRLLEPLGLVEEAAKTAPGKKRPVEQSPQEPDSSAGIGKSGAQPAKKRLNFGQTGDTESVPDPQPIGEPPAAPSGVGSLTMASGGGAPVADNNEGADGVGSSSGNWHCDSQWLGDRVITTSTRTWALPTYNNHLYKQISNSTSGGSSNDNAYFGYSTPWGYFDFNRFHCHFSPRDWQRLINNNWGFRPKRLNFKLFNIQVKEVTDNNGVKTIANNLTSTVQVFTDSDYQLPYVLGSAHEGCLPPFPADVFMIPQYGYLTLNDGSQAVGRSSFYCLEYFPSQMLRTGNNFQFSYEFENVPFHSSYAHSQSLDRLMNPLIDQYLYYLSKTINGSGQNQQTLKFSVAGPSNMAVAGRNYIPGPSYRQQRVSTTVTQNNNSEFAWPGASSWALNGRNSLMNPGPAMASHKEGEDRFFPLSGSLIFGKQGTGRDNVDADKVMITNEEEIKTTNPVATESYGQVATNHQSAQAQAQTGWVQNQGILPGMVWQDRDVYLQGPIWAKIPHTDGNFHPSPLMGGFGMKHPPPQILIKNTPVPADPPTAFNKDKLNSFITQYSTGQVSVEIEWELQKENSKRWNPEIQYTSNYYKSNNVEFAVNTEGVYSEPRPIGTRYLTRNL

SEQ ID NO: 73 - protein, 744 aa, Artificial Sequence
  /note="Description of Artificial Sequence: Synthetic" polypeptide
MAADGYLPDWLEDNLSEGIREWWALKPGAPQPKANQQHQDNARGLVLPGYKYLGPGNGLDKGEPVNAADAAALEHDKAYDQQLKAGDNPYLKYNHADAEFQERLKEDTSFGGNLGRAVFQAKKRLLEPLGLVEEAAKTAPGKKRPVEQSPQEPDSSAGIGKSGAQPAKKRLNFGQTGDTESVPDPQPIGEPPAAPSGVGSLTMASGGGAPVADNNEGADGVGSSSGNWHCDSQWLGDRVITTSTRTWALPTYNNHLYKQISNSTSGGSSNDNAYFGYSTPWGYFDFNRFHCHFSPRDWQRLINNNWGFRPKRLNFKLFNIQVKEVTDNNGVKTIANNLTSTVQVFTDSDYQLPYVLGSAHEGCLPPFPADVFMIPQYGYLTLNDGSQAVGRSSFYCLEYFPSQMLRTGNNFQFSYEFENVPFHSSYAHSQSLDRLMNPLIDQYLYYLSKTINGSDDDDDDDDGQNQQTLKFSVAGPSNMAVQGRNYIPGPSYRQQRVSTTVTQNNNSEFAWPGASSWALNGRNSLMNPGPAMASHKEGEDRFFPLSGSLIFGKQGTGRDNVDADKVMITNEEEIKTTNPVATESYGQVATNHQSAQAQAQTGWVQNQGILPGMVWQDRDVYLQGPIWAKIPHTDGNFHPSPLMGGFGMKHPPPQILIKNTPVPADPPTAFNKDKLNSFITQYSTGQVSVEIEWELQKENSKRWNPEIQYTSNYYKSNNVEFAVNTEGVYSEPRPIGTRYLTRNL

SEQ ID NO: 74 - protein, 743 aa, Artificial Sequence
  /note="Description of Artificial Sequence: Synthetic" polypeptide
MAADGYLPDWLEDNLSEGIREWWALKPGAPQPKANQQHQDNARGLVLPGYKYLGPGNGLDKGEPVNAADAAALEHDKAYDQQLKAGDNPYLKYNHADAEFQERLKEDTSFGGNLGRAVFQAKKRLLEPLGLVEEAAKTAPGKKRPVEQSPQEPDSSAGIGKSGAQPAKKRLNFGQTGDTESVPDPQPIGEPPAAPSGVGSLTMASGGGAPVADNNEGADGVGSSSGNWHCDSQWLGDRVITTSTRTWALPTYNNHLYKQISNSTSGGSSNDNAYFGYSTPWGYFDFNRFHCHFSPRDWQRLINNNWGFRPKRLNFKLFNIQVKEVTDNNGVKTIANNLTSTVQVFTDSDYQLPYVLGSAHEGCLPPFPADVFMIPQYGYLTLNDGSQAVGRSSFYCLEYFPSQMLRTGNNFQFSYEFENVPFHSSYAHSQSLDRLMNPLIDQYLYYLSKTINGSLSSRLDAGQNQQTLKFSVAGPSNMAVQGRNYIPGPSYRQQRVSTTVTQNNNSEFAWPGASSWALNGRNSLMNPGPAMASHKEGEDRFFPLSGSLIFGKQGTGRDNVDADKVMITNEEEIKTTNPVATESYGQVATNHQSAQAQAQTGWVQNQGILPGMVWQDRDVYLQGPIWAKIPHTDGNFHPSPLMGGFGMKHPPPQILIKNTPVPADPPTAFNKDKLNSFITQYSTGQVSVEIEWELQKENSKRWNPEIQYTSNYYKSNNVEFAVNTEGVYSEPRPIGTRYLTRNL

SEQ ID NO: 75 - protein, 745 aa, Artificial Sequence
  /note="Description of Artificial Sequence: Synthetic" polypeptide
MAADGYLPDWLEDNLSEGIREWWALKPGAPQPKANQQHQDNARGLVLPGYKYLGPGNGLDKGEPVNAADAAALEHDKAYDQQLKAGDNPYLKYNHADAEFQERLKEDTSFGGNLGRAVFQAKKRLLEPLGLVEEAAKTAPGKKRPVEQSPQEPDSSAGIGKSGAQPAKKRLNFGQTGDTESVPDPQPIGEPPAAPSGVGSLTMASGGGAPVADNNEGADGVGSSSGNWHCDSQWLGDRVITTSTRTWALPTYNNHLYKQISNSTSGGSSNDNAYFGYSTPWGYFDFNRFHCHFSPRDWQRLINNNWGFRPKRLNFKLFNIQVKEVTDNNGVKTIANNLTSTVQVFTDSDYQLPYVLGSAHEGCLPPFPADVFMIPQYGYLTLNDGSQAVGRSSFYCLEYFPSQMLRTGNNFQFSYEFENVPFHSSYAHSQSLDRLMNPLIDQYLYYLSKTINGSCLSSRLDACGQNQQTLKFSVAGPSNMAVQGRNYIPGPSYRQQRVSTTVTQNNNSEFAWPGASSWALNGRNSLMNPGPAMASHKEGEDRFFPLSGSLIFGKQGTGRDNVDADKVMITNEEEIKTTNPVATESYGQVATNHQSAQAQAQTGWVQNQGILPGMVWQDRDVYLQGPIWAKIPHTDGNFHPSPLMGGFGMKHPPPQILIKNTPVPADPPTAFNKDKLNSFITQYSTGQVSVEIEWELQKENSKRWNPEIQYTSNYYKSNNVEFAVNTEGVYSEPRPIGTRYLTRNL

SEQ ID NO: 76 - protein, 741 aa, Artificial Sequence
  /note="Description of Artificial Sequence: Synthetic" polypeptide
MAADGYLPDWLEDNLSEGIREWWALKPGAPQPKANQQHQDNARGLVLPGYKYLGPGNGLDKGEPVNAADAAALEHDKAYDQQLKAGDNPYLKYNHADAEFQERLKEDTSFGGNLGRAVFQAKKRLLEPLGLVEEAAKTAPGKKRPVEQSPQEPDSSAGIGKSGAQPAKKRLNFGQTGDTESVPDPQPIGEPPAAPSGVGSLTMASGGGAPVADNNEGADGVGSSSGNWHCDSQWLGDRVITTSTRTWALPTYNNHLYKQISNSTSGGSSNDNAYFGYSTPWGYFDFNRFHCHFSPRDWQRLINNNWGFRPKRLNFKLFNIQVKEVTDNNGVKTIANNLTSTVQVFTDSDYQLPYVLGSAHEGCLPPFPADVFMIPQYGYLTLNDGSQAVGRSSFYCLEYFPSQMLRTGNNFQFSYEFENVPFHSSYAHSQSLDRLMNPLIDQYLYYLSKTINGSLPVASGQNQQTLKFSVAGPSNMAVQGRNYIPGPSYRQQRVSTTVTQNNNSEFAWPGASSWALNGRNSLMNPGPAMASHKEGEDRFFPLSGSLIFGKQGTGRDNVDADKVMITNEEEIKTTNPVATESYGQVATNHQSAQAQAQTGWVQNQGILPGMVWQDRDVYLQGPIWAKIPHTDGNFHPSPLMGGFGMKHPPPQILIKNTPVPADPPTAFNKDKLNSFITQYSTGQVSVEIEWELQKENSKRWNPEIQYTSNYYKSNNVEFAVNTEGVYSEPRPIGTRYLTRNL

SEQ ID NO: 77 - protein, 743 aa, Artificial Sequence
  /note="Description of Artificial Sequence: Synthetic" polypeptide
MAADGYLPDWLEDNLSEGIREWWALKPGAPQPKANQQHQDNARGLVLPGYKYLGPGNGLDKGEPVNAADAAALEHDKAYDQQLKAGDNPYLKYNHADAEFQERLKEDTSFGGNLGRAVFQAKKRLLEPLGLVEEAAKTAPGKKRPVEQSPQEPDSSAGIGKSGAQPAKKRLNFGQTGDTESVPDPQPIGEPPAAPSGVGSLTMASGGGAPVADNNEGADGVGSSSGNWHCDSQWLGDRVITTSTRTWALPTYNNHLYKQISNSTSGGSSNDNAYFGYSTPWGYFDFNRFHCHFSPRDWQRLINNNWGFRPKRLNFKLFNIQVKEVTDNNGVKTIANNLTSTVQVFTDSDYQLPYVLGSAHEGCLPPFPADVFMIPQYGYLTLNDGSQAVGRSSFYCLEYFPSQMLRTGNNFQFSYEFENVPFHSSYAHSQSLDRLMNPLIDQYLYYLSKTINGSCLPVASCGQNQQTLKFSVAGPSNMAVQGRNYIPGPSYRQQRVSTTVTQNNNSEFAWPGASSWALNGRNSLMNPGPAMASHKEGEDRFFPLSGSLIFGKQGTGRDNVDADKVMITNEEEIKTTNPVATESYGQVATNHQSAQAQAQTGWVQNQGILPGMVWQDRDVYLQGPIWAKIPHTDGNFHPSPLMGGFGMKHPPPQILIKNTPVPADPPTAFNKDKLNSFITQYSTGQVSVEIEWELQKENSKRWNPEIQYTSNYYKSNNVEFAVNTEGVYSEPRPIGTRYLTRNL

SEQ ID NO: 78 - protein, 743 aa, Artificial Sequence
  /note="Description of Artificial Sequence: Synthetic" polypeptide
MAADGYLPDWLEDNLSEGIREWWALKPGAPQPKANQQHQDNARGLVLPGYKYLGPGNGLDKGEPVNAADAAALEHDKAYDQQLKAGDNPYLKYNHADAEFQERLKEDTSFGGNLGRAVFQAKKRLLEPLGLVEEAAKTAPGKKRPVEQSPQEPDSSAGIGKSGAQPAKKRLNFGQTGDTESVPDPQPIGEPPAAPSGVGSLTMASGGGAPVADNNEGADGVGSSSGNWHCDSQWLGDRVITTSTRTWALPTYNNHLYKQISNSTSGGSSNDNAYFGYSTPWGYFDFNRFHCHFSPRDWQRLINNNWGFRPKRLNFKLFNIQVKEVTDNNGVKTIANNLTSTVQVFTDSDYQLPYVLGSAHEGCLPPFPADVFMIPQYGYLTLNDGSQAVGRSSFYCLEYFPSQMLRTGNNFQFSYEFENVPFHSSYAHSQSLDRLMNPLIDQYLYYLSKTINGSASSLNIAGQNQQTLKFSVAGPSNMAVQGRNYIPGPSYRQQRVSTTVTQNNNSEFAWPGASSWALNGRNSLMNPGPAMASHKEGEDRFFPLSGSLIFGKQGTGRDNVDADKVMITNEEEIKTTNPVATESYGQVATNHQSAQAQAQTGWVQNQGILPGMVWQDRDVYLQGPIWAKIPHTDGNFHPSPLMGGFGMKHPPPQILIKNTPVPADPPTAFNKDKLNSFITQYSTGQVSVEIEWELQKENSKRWNPEIQYTSNYYKSNNVEFAVNTEGVYSEPRPIGTRYLTRNL

SEQ ID NO: 79 - protein, 743 aa, Artificial Sequence
  /note="Description of Artificial Sequence: Synthetic" polypeptide
MAADGYLPDWLEDNLSEGIREWWALKPGAPQPKANQQHQDNARGLVLPGYKYLGPGNGLDKGEPVNAADAAALEHDKAYDQQLKAGDNPYLKYNHADAEFQERLKEDTSFGGNLGRAVFQAKKRLLEPLGLVEEAAKTAPGKKRPVEQSPQEPDSSAGIGKSGAQPAKKRLNFGQTGDTESVPDPQPIGEPPAAPSGVGSLTMASGGGAPVADNNEGADGVGSSSGNWHCDSQWLGDRVITTSTRTWALPTYNNHLYKQISNSTSGGSSNDNAYFGYSTPWGYFDFNRFHCHFSPRDWQRLINNNWGFRPKRLNFKLFNIQVKEVTDNNGVKTIANNLTSTVQVFTDSDYQLPYVLGSAHEGCLPPFPADVFMIPQYGYLTLNDGSQAVGRSSFYCLEYFPSQMLRTGNNFQFSYEFENVPFHSSYAHSQSLDRLMNPLIDQYLYYLSKTINGSHAIYPRHGQNQQTLKFSVAGPSNMAVQGRNYIPGPSYRQQRVSTTVTQNNNSEFAWPGASSWALNGRNSLMNPGPAMASHKEGEDRFFPLSGSLIFGKQGTGRDNVDADKVMITNEEEIKTTNPVATESYGQVATNHQSAQAQAQTGWVQNQGILPGMVWQDRDVYLQGPIWAKIPHTDGNFHPSPLMGGFGMKHPPPQILIKNTPVPADPPTAFNKDKLNSFITQYSTGQVSVEIEWELQKENSKRWNPEIQYTSNYYKSNNVEFAVNTEGVYSEPRPIGTRYLTRNL

SEQ ID NO: 80 - protein, 743 aa, Artificial Sequence
  /note="Description of Artificial Sequence: Synthetic" polypeptide
MAADGYLPDWLEDNLSEGIREWWALKPGAPQPKANQQHQDNARGLVLPGYKYLGPGNGLDKGEPVNAADAAALEHDKAYDQQLKAGDNPYLKYNHADAEFQERLKEDTSFGGNLGRAVFQAKKRLLEPLGLVEEAAKTAPGKKRPVEQSPQEPDSSAGIGKSGAQPAKKRLNFGQTGDTESVPDPQPIGEPPAAPSGVGSLTMASGGGAPVADNNEGADGVGSSSGNWHCDSQWLGDRVITTSTRTWALPTYNNHLYKQISNSTSGGSSNDNAYFGYSTPWGYFDFNRFHCHFSPRDWQRLINNNWGFRPKRLNFKLFNIQVKEVTDNNGVKTIANNLTSTVQVFTDSDYQLPYVLGSAHEGCLPPFPADVFMIPQYGYLTLNDGSQAVGRSSFYCLEYFPSQMLRTGNNFQFSYEFENVPFHSSYAHSQSLDRLMNPLIDQYLYYLSKTINGSRTIGPSVGQNQQTLKFSVAGPSNMAVQGRNYIPGPSYRQQRVSTTVTQNNNSEFAWPGASSWALNGRNSLMNPGPAMASHKEGEDRFFPLSGSLIFGKQGTGRDNVDADKVMITNEEEIKTTNPVATESYGQVATNHQSAQAQAQTGWVQNQGILPGMVWQDRDVYLQGPIWAKIPHTDGNFHPSPLMGGFGMKHPPPQILIKNTPVPADPPTAFNKDKLNSFITQYSTGQVSVEIEWELQKENSKRWNPEIQYTSNYYKSNNVEFAVNTEGVYSEPRPIGTRYLTRNL

SEQ ID NO: 81 - protein, 745 aa, Artificial Sequence
  /note="Description of Artificial Sequence: Synthetic" polypeptide
MAADGYLPDWLEDNLSEGIREWWALKPGAPQPKANQQHQDNARGLVLPGYKYLGPGNGLDKGEPVNAADAAALEHDKAYDQQLKAGDNPYLKYNHADAEFQERLKEDTSFGGNLGRAVFQAKKRLLEPLGLVEEAAKTAPGKKRPVEQSPQEPDSSAGIGKSGAQPAKKRLNFGQTGDTESVPDPQPIGEPPAAPSGVGSLTMASGGGAPVADNNEGADGVGSSSGNWHCDSQWLGDRVITTSTRTWALPTYNNHLYKQISNSTSGGSSNDNAYFGYSTPWGYFDFNRFHCHFSPRDWQRLINNNWGFRPKRLNFKLFNIQVKEVTDNNGVKTIANNLTSTVQVFTDSDYQLPYVLGSAHEGCLPPFPADVFMIPQYGYLTLNDGSQAVGRSSFYCLEYFPSQMLRTGNNFQFSYEFENVPFHSSYAHSQSLDRLMNPLIDQYLYYLSKTINGSCRTIGPSVCGQNQQTLKFSVAGPSNMAVQGRNYIPGPSYRQQRVSTTVTQNNNSEFAWPGASSWALNGRNSLMNPGPAMASHKEGEDRFFPLSGSLIFGKQGTGRDNVDADKVMITNEEEIKTTNPVATESYGQVATNHQSAQAQAQTGWVQNQGILPGMVWQDRDVYLQGPIWAKIPHTDGNFHPSPLMGGFGMKHPPPQILIKNTPVPADPPTAFNKDKLNSFITQYSTGQVSVEIEWELQKENSKRWNPEIQYTSNYYKSNNVEFAVNTEGVYSEPRPIGTRYLTRNL

SEQ ID NO: 82 - protein, 747 aa, Artificial Sequence
  /note="Description of Artificial Sequence: Synthetic" polypeptide
MAADGYLPDWLEDNLSEGIREWWALKPGAPQPKANQQHQDNARGLVLPGYKYLGPGNGLDKGEPVNAADAAALEHDKAYDQQLKAGDNPYLKYNHADAEFQERLKEDTSFGGNLGRAVFQAKKRLLEPLGLVEEAAKTAPGKKRPVEQSPQEPDSSAGIGKSGAQPAKKRLNFGQTGDTESVPDPQPIGEPPAAPSGVGSLTMASGGGAPVADNNEGADGVGSSSGNWHCDSQWLGDRVITTSTRTWALPTYNNHLYKQISNSTSGGSSNDNAYFGYSTPWGYFDFNRFHCHFSPRDWQRLINNNWGFRPKRLNFKLFNIQVKEVTDNNGVKTIANNLTSTVQVFTDSDYQLPYVLGSAHEGCLPPFPADVFMIPQYGYLTLNDGSQAVGRSSFYCLEYFPSQMLRTGNNFQFSYEFENVPFHSSYAHSQSLDRLMNPLIDQYLYYLSKTINGSGQNQQTLKFSVAGPSNMAVQGRNYIPGPSYRQQRVSTTVTQNNNSITLVKSTQTVSEFAWPGASSWALNGRNSLMNPGPAMASHKEGEDRFFPLSGSLIFGKQGTGRDNVDADKVMITNEEEIKTTNPVATESYGQVATNHQSAQAQAQTGWVQNQGILPGMVWQDRDVYLQGPIWAKIPHTDGNFHPSPLMGGFGMKHPPPQILIKNTPVPADPPTAFNKDKLNSFITQYSTGQVSVEIEWELQKENSKRWNPEIQYTSNYYKSNNVEFAVNTEGVYSEPRPIGTRYLTRNL

SEQ ID NO: 83 - protein, 746 aa, Artificial Sequence
  /note="Description of Artificial Sequence: Synthetic" polypeptide
MAADGYLPDWLEDNLSEGIREWWALKPGAPQPKANQQHQDNARGLVLPGYKYLGPGNGLDKGEPVNAADAAALEHDKAYDQQLKAGDNPYLKYNHADAEFQERLKEDTSFGGNLGRAVFQAKKRLLEPLGLVEEAAKTAPGKKRPVEQSPQEPDSSAGIGKSGAQPAKKRLNFGQTGDTESVPDPQPIGEPPAAPSGVGSLTMASGGGAPVADNNEGADGVGSSSGNWHCDSQWLGDRVITTSTRTWALPTYNNHLYKQISNSTSGGSSNDNAYFGYSTPWGYFDFNRFHCHFSPRDWQRLINNNWGFRPKRLNFKLFNIQVKEVTDNNGVKTIANNLTSTVQVFTDSDYQLPYVLGSAHEGCLPPFPADVFMIPQYGYLTLNDGSQAVGRSSFYCLEYFPSQMLRTGNNFQFSYEFENVPFHSSYAHSQSLDRLMNPLIDQYLYYLSKTINGSGQNQQTLKFSVAGPSNMAVQGRNYIPGPSYRQQRVSTTVTQNNNTILSRSTQTGSEFAWPGASSWALNGRNSLMNPGPAMASHKEGEDRFFPLSGSLIFGKQGTGRDNVDADKVMITNEEEIKTTNPVATESYGQVATNHQSAQAQAQTGWVQNQGILPGMVWQDRDVYLQGPIWAKIPHTDGNFHPSPLMGGFGMKHPPPQILIKNTPVPADPPTAFNKDKLNSFITQYSTGQVSVEIEWELQKENSKRWNPEIQYTSNYYKSNNVEFAVNTEGVYSEPRPIGTRYLTRNL

SEQ ID NO: 84 - protein, 753 aa, Artificial Sequence
  /note="Description of Artificial Sequence: Synthetic" polypeptide
MAADGYLPDWLEDNLSEGIREWWALKPGAPQPKANQQHQDNARGLVLPGYKYLGPGNGLDKGEPVNAADAAALEHDKAYDQQLKAGDNPYLKYNHADAEFQERLKEDTSFGGNLGRAVFQAKKRLLEPLGLVEEAAKTTILSRSTQTGAPGKKRPVEQSPQEPDSSAGIGKSGAQPAKKRLNFGQTGDTESVPDPQPIGEPPAAPSGVGSLTMASGGGAPVADNNEGADGVGSSSGNWHCDSQWLGDRVITTSTRTWALPTYNNHLYKQISNSTSGGSSNDNAYFGYSTPWGYFDFNRFHCHFSPRDWQRLINNNWGFRPKRLNFKLFNIQVKEVTDNNGVKTIANNLTSTVQVFTDSDYQLPYVLGSAHEGCLPPFPADVFMIPQYGYLTLNDGSQAVGRSSFYCLEYFPSQMLRTGNNFQFSYEFENVPFHSSYAHSQSLDRLMNPLIDQYLYYLSRTINGSGQNQQTLKFSVAGPSNMAVQGRNYIPGPSYRQQRVSTTVTQNNNSEFAWPGASSWALNGRNSLMNPGPAMASHKEGEDRFFPLSGSLIFGKQGTGRDNVDADKVMITNEEEIKTTNPVATESYGQVATNHQSDGTLAVPFKAQAQTGWVQNQGILPGMVWQDRDVYLQGPIWAKIPHTDGNFHPSPLMGGFGMKHPPPQILIKNTPVPADPPTAFNKDKLNSFITQYSTGQVSVEIEWELQKENSKRWNPEIQYTSNYYKSNNVEFAVNTEGVYSEPRPIGTRYLTRNL

SEQ ID NO: 85 - protein, 754 aa, Artificial Sequence
  /note="Description of Artificial Sequence: Synthetic" polypeptide
MAADGYLPDWLEDNLSEGIREWWALKPGAPQPKANQQHQDNARGLVLPGYKYLGPGNGLDKGEPVNAADAAALEHDKAYDQQLKAGDNPYLKYNHADAEFQERLKEDTSFGGNLGRAVFQAKKRLLEPLGLVEEAAKTSITLVKSTQTVAPGKKRPVEQSPQEPDSSAGIGKSGAQPAKKRLNFGQTGDTESVPDPQPIGEPPAAPSGVGSLTMASGGGAPVADNNEGADGVGSSSGNWHCDSQWLGDRVITTSTRTWALPTYNNHLYKQISNSTSGGSSNDNAYFGYSTPWGYFDFNRFHCHFSPRDWQRLINNNWGFRPKRLNFKLFNIQVKEVTDNNGVKTIANNLTSTVQVFTDSDYQLPYVLGSAHEGCLPPFPADVFMIPQYGYLTLNDGSQAVGRSSFYCLEYFPSQMLRTGNNFQFSYEFENVPFHSSYAHSQSLDRLMNPLIDQYLYYLSRTINGSGQNQQTLKFSVAGPSNMAVQGRNYIPGPSYRQQRVSTTVTQNNNSEFAWPGASSWALNGRNSLMNPGPAMASHKEGEDRFFPLSGSLIFGKQGTGRDNVDADKVMITNEEEIKTTNPVATESYGQVATNHQSDGTLAVPFKAQAQTGWVQNQGILPGMVWQDRDVYLQGPIWAKIPHTDGNFHPSPLMGGFGMKHPPPQILIKNTPVPADPPTAFNKDKLNSFITQYSTGQVSVEIEWELQKENSKRWNPEIQYTSNYYKSNNVEFAVNTEGVYSEPRPIGTRYLTRNL

SEQ ID NO: 86 - protein, 9 aa, Unknown
  Description of Unknown: hemagglutinin sequence
YPYDVPDYA

SEQ ID NO: 87 - protein, 35 aa, Adeno-associated virus
  MOD_RES (14)..(14): Gln, Thr, Asn or Gly
  MOD_RES (15)..(15): Asn, Gln or Thr
  MOD_RES (23)..(23): Gly, Ala, Leu or Asn
  MOD_RES (30)..(30): Val, Asp, Leu, Asn, Glu or Ala
YYLSRTQNTGGTAXXQTLLFSQXGPSNMSXQAKNW

SEQ ID NO: 88 - protein, 35 aa, Adeno-associated virus
YYLNRTQNQSGSAQNKDLLFSRGSPAGMSVQPKNW

SEQ ID NO: 89 - protein, 35 aa, Adeno-associated virus
YYLSRTNTPSGTTTQSRLQFSQAGASDIRDQSRNW

SEQ ID NO: 90 - protein, 36 aa, Adeno-associated virus
YYLNRTQGTTSGTTNQSRLLFSQAGPQSMSLQARNW

SEQ ID NO: 91 - protein, 36 aa, Adeno-associated virus
WGLQSTTTGTTLNAGTATTNFTKLRPTNFSNFKKNW

SEQ ID NO: 92 - protein, 29 aa, Adeno-associated virus
YRFVSTNNTGGVQFNKNLAGRYANTYKNW

SEQ ID NO: 93 - protein, 36 aa, Adeno-associated virus
YYLARTQSNPGGTAGNRELQFYQGGPSTMAEQAKNW

SEQ ID NO: 94 - protein, 35 aa, Adeno-associated virus
YYLSRTQTTGGTANTQTLGFSQGGPNTMANQAKNW

SEQ ID NO: 95 - protein, 34 aa, Adeno-associated virus
YYLSKTINGSGQNQQTLKFSVAGPSNMAVQGRNY

SEQ ID NO: 96 - protein, 35 aa, Adeno-associated virus
YYLSRTQSTGGTAGTQQLLFSQAGPNNMSAQAKNW

SEQ ID NO: 97 - protein, 1542 aa, Homo sapiens
MEQPNSKGYSLGRTPQGPECSSAPAVQVGTHRGLEYNPGKILPGSDYGLGNPPALDPKLPHLPLPPAPPTLSDLGQPRKSPLTGTDKKYPLMKQRGFYSDILSPGTLDQLGEVCRGPRMSQNLLRQADLDKFTPRVGSFEVPEDFQERMEQQCIGSTTRLLAQTDFPLQAYEPKMQVPFQVLPGQHPRKIEIERRKQQYLSLDIEQLLFSQGIDSNKLMPRHLDHQHPQTIEQGHDPIFPIYLPLKVFDNEDFDCRTPREWINMGLEPGSLDRKPVPGKALLPTDDFLGHEDPKSQKLKYKWCEVGVLDYDEEKKLYLVHKTDEKGLVRDEMGRPILNAGVTTEGRPPLQVCQYWVPRIQLLFCAEDPCMFAQRVVQANALRKNTEALLLYNLYVDCMPSDGQHVISEQSLSKIKQWALSTPRMRKGPSVLEHLSSLAREVSLDYERSMNKINFDHVVSSKPETFSYVTLPKKEEEQVPERGLVSVPKYHFWEQKEDFTFVSLLTRPEVITALSKVRAECNKVTAMSLFHSSLSKYSHLEEFEQIQSQTFSQVQMFLKDSWISSLKVAMRSSLRDMSKGWYNLYETNWEVYLMSKLRKLMELVKYMLQDTLRFLVQDSLASFSQFISDTCCSVLNCTDDMVWGDDLINSPYRPRKNPLFIMDLVLDSSGVHYSTPLEQFEASLLNLFDKGILATHAVPQLEKLVMEDIFISGDPLLESVGLHEPLVEELRATIASAVSKAMIPLQAYAKEYRKYLELNNNDIASFLKTYQTQGLLAQEVREVVLTHLREKEILDSSLPSSIIIGPFYINTDNVKQSLSKKRKALATSVLDILAKNLHKEVDSICEEFRSISRKIYEKPNSIEELAELREWMKGIPERLVGLEERIVKVMDDYQVMDEFLYNLSSDDFNDKWIASNWPSKILGQIELVQQQHVEDEEKFRKIQIMDQNNFQEKLEGLQLVVAGFSIHVEISRAHEIANEVRRVKKQLKDCQQLAMLYNNRERIFSLPITNYDKLSRMVKEFQPYLDLWTTASDWLRWSESWMNDPLSAIDAEQLEKNVVEAFKTMHKCVKQFKDMPACQEVALDIRARIEEFKPYIPLIQGLRNPGMRIRHWETLSNQININVRPKANLTFARCLEMNLQDHIESISKVAEVAGKEYAIEQALDKMEKEWSTILFNVLPYKATDTYILKSPDEASQLLDDHIVMTQNMSFSPYKKPFEQRINSWENKLKLTQEVLEEWLNCQRSWLYLEPIFSSEDINQQLPVESKRYQTMERIWKKIMKNAYENREVINVCSDLRMLDSLRDCNKILDLVQKGLSEYLETKRSAFPRFYFLSDDELLEILSQTKDPTAVQPHLRKCFENIARLLFQEDLEITHMYSAEGEEVQLCFSIYPSSNVEDWLREVERSMKASVHDIIEKAIRAYPTMPRTQWVLNWPGQVTIAGCQTYWTMEVAEALEAGNLRSQLFPQLCQQLSDLVALVRGKLSRMQRAVLSALIVIEVHAKDVVSKLIQENVVSVNDFQWISQLRYYWTNNDLYIRAVNAEFI

SEQ ID NO: 98 - protein, 1764 aa, Homo sapiens
MSSKAEKKQRLSGRGSSQASWSGRATRAAVATQEQGNAPAVSEPELQAELPKEEPEPRLEGPQAQSEESVEPEADVKPLFLSRAALTGLADAVWTQEHDAILEHFAQDPTESILTIFIDPCFGLKLELGMPVQTQNQLVYFIRQAPVPITWENFEATVQFGTVRGPYIPALLRLLGGVFAPQIFANTGWPESIRNHFASHLHKFLACLTDTRYKLEGHTVLYIPAEAMNMKPEMVIKDKELVQRLETSMIHWTRQIKEMLSAQETVETGENLGPLEEIEFWRNRCMDLSGISKQLVKKGVKHVESILHLAKSSYLAPFMKLAQQIQDGSRQAQSNLTFLSILKEPYQELAFMKPKDISSKLPKLISLIRIIWVNSPHYNTRERLTSLFRKVCDCQYHFARWEDGKQGPLPCFFGAQGPQITRNLLEIEDIFHKNLHTLRAVRGGILDVKNTCWHEDYNKFRAGIKDLEVMTQNLITSAFELVRDVPHGVLLLDTFHRLASREAIKRTYDKKAVDLYMLFNSELALVNRERNKKWPDLEPYVAQYSGKARWVHILRRRIDRVMTCLAGAHFLPRIGTGKESVHTYQQMVQAIDELVRKTFQEWTSSLDKDCIRRLDTPLLRISQEKAGMLDVNFDKSLLILFAEIDYWERLLFETPHYVVNVAERAEDLRILRENLLLVARDYNRIIAMLSPDEQALFKERIRLLDKKIHPGLKKLHWALKGASAFFITECRIHASKVQMIVNEFKASTLTIGWRAQEMSEKLLVRISGKRVYRDLEFEEDQREHRAAVQQKLMNLHQDVVTIMTNSYEVFKNDGPEIQQQWMLYMIRLDRMMEDALRLNVKWSLLELSKAINGDGKTSPNPLFQVLVILKNDLQGSVAQVEFSPTLQTLAGVVNDIGNHLFSTISVFCHLPDILTKRKLHREPIQTVVEQDEDIKKIQTQISSGMTNNASLLQNYLKTWDMYREIWEINKDSFIHRYQRLNPPVSSFVADIARYTEVANNVQKEETVTNIQFVLLDCSHLKFSLVQHCNEWQNKFATLLREMAAGRLLELHTYLKENAEKISRPPQTLEELGVSLQLVDALKHDLANVETQIPPIHEQFAILEKYEVPVEDSVLEMLDSLNGEWVVFQQTLLDSKQMLKKHKEKFKTGLIHSADDFKKKAHTLLEDFEFKGHFTSNVGYMSALDQITQVRAMLMAMREEENSLRANLGIFKIEQPPSKDLQNLEKELDALQQIWEIARDWEENWNEWKTGRFLILQTETMETTAHGLFRRLTKLAKEYKDRNWEIIETTRSKIEQFKRTMPLISDLRNPALRERHWDQVRDEIQREFDQESESFTLEQIVELGMDQHVEKIGEISASATKELAIEVALQNIAKTWDVTQLDIVPYKDKGHHRLRGTEEVFQALEDNQVALSTMKASRFVKAFEKDVDHWERCLSLILEVIEMILTVQRQWMYLENIFLGEDIRKQLPNESTLFDQVNSNWKAIMDRMNKDNNALRSTHHPGLLDTLIEMNTILEDIQKSLDMYLETKRHIFPRFYFLSNDDLLEILGQSRNPEAVQPHLKKCFDNIKLLRIQKVGGPSSKWEAVGMFSGDGEYIDFLHSVFLEGPVESWLGDVEQTMRVTLRDLLRNCHLALRKFLNKRDKWVKEWAGQVVITASQIQWTADVTKCLLTAKERADKKILKVMKKNQVSILNKYSEAIRGNLTKIMRLKIVALVTIEIHARDVLEKLYKSGLMDVNSFDWLSQLRFYWEKDLDDCVIRQTNTQFQ

SEQ ID NO: 99 - protein, 1390 aa, Homo sapiens
MGATGRLELTLAAPPHPGPAFQRSKARETQGEEEGSEMQIAKSDSIHHMSHSQGQPELPPLPASANEEPSGLYQTVMSHSFYPPLMQRTSWTLAAPFKEQHHHRGPSDSIANNYSLMAQDLKLKDLLKVYQPATISVPRDRTGQGLPSSGNRSSSEPMRKKTKFSSRNKEDSTRIKLAFKTSIFSPMKKEVKTSLTFPGSRPMSPEQQLDVMLQQEMEMESKEKKPSESDLERYYYYLTNGIRKDMIAPEEGEVMVRISKLISNTLLTSPFLEPLMVVLVQEKENDYYCSLMKSIVDYILMDPMERKRLFIESIPRLFPQRVIRAPVPWHSVYRSAKKWNEEHLHTVNPMMLRLKELWFAEFRDLRFVRTAEILAGKLPLQPQEFWDVIQKHCLEAHQTLLNKWIPTCAQLFTSRKEHWIHFAPKSNYDSSRNIEEYFASVASFMSLQLRELVIKSLEDLVSLFMIHKDGNDFKEPYQEMKFFIPQLIMIKLEVSEPIIVFNPSFDGCWELIRDSFLEIIKNSNGIPKLKYIPLKFSFTAAAADRQCVKAAEPGEPSMHAAATAMAELKGYNLLLGTVNAEEKLVSDFLIQTFKVFQKNQVGPCKYLNVYKKYVDLLDNTAEQNIAAFLKENHDIDDFVTKINAIKKRRNEIASMNITVPLAMFCLDATALNHDLCERAQNLKDHLIQFQVDVNRDTNTSICNQYSHIADKVSEVPANTKELVSLIEFLKKSSAVTVFKLRRQLRDASERLEFLMDYADLPYQIEDIFDNSRNLLLHKRDQAEMDLIKRCSEFELRLEGYHRELESFRKREVMTTEEMKHNVEKLNELSKNLNRAFAEFELINKEEELLEKEKSTYPLLQAMLKNKVPYEQLWSTAYEFSIKSEEWMNGPLFLLNAEQIAEEIGNMWRTTYKLIKTLSDVPAPRRLAENVKIKIDKFKQYIPILSISCNPGMKDRHWQQISEIVGYEIKPTETTCLSNMLEFGFGKFVEKLEPIGAAASKEYSLEKNLDRMKLDWVNVTFSFVKYRDTDTNILCAIDDIQMLLDDHVIKTQTMCGSPFIKPIEAECRKWEEKLIRIQDNLDAWLKCQATWLYLEPIFSSEDIIAQMPEEGRKFGIVDSYWKSLMSQAVKDNRILVAADQPRMAEKLQEANFLLEDIQKGLNDYLEKKRLFFPRFFFLSNDELLEILSETKDPLRVQPHLKKCFEGIAKLEFTDNLEIVGMISSEKETVPFIQKIYPANAKGMVEKWLQQVEQMMLASMREVIGLGIEAYVKVPRNHWVLQWPGQVVICVSSIFWTQEVSQALAENTLLDFLKKSNDQIAQIVQLVRGKLSSGARLTLGALTVIDVHARDVVAKLSEDRVSDLNDFQWISQLRYYWVAKDVQVQIITTEAL

SEQ ID NO: 100 - protein, 1941 aa, Homo sapiens
MFRIGRRQLWKHSVTRVLTQRLKGEKEAKRALLDARHNYLFAIVASCLDLNKTEVEDAILEGNQIERIDQLFAVGGLRHLMFYYQDVEEAETGQLGSLGGVNLVSGKIKKPKVFVTEGNDVALTGVCVFFIRTDPSKAITPDNIHQEVSFNMLDAADGGLLNSVRRLLSDIFIPALRATSHGWGELEGLQDAANIRQEFLSSLEGFVNVLSGAQESLKEKVNLRKCDILELKTLKEPTDYLTLANNPETLGKIEDCMKVWIKQTEQVLAENNQLLKEADDVGPRAELEHWKKRLSKFNYLLEQLKSPDVKAVLAVLAAAKSKLLKTWREMDIRITDATNEAKDNVKYLYTLEKCCDPLYSSDPLSMMDAIPTLINAIKMIYSISHYYNTSEKITSLFVKVTNQIISACKAYITNNGTASIWNQPQDVVEEKILSAIKLKQEYQLCFHKTKQKLKQNPNAKQFDFSEMYIFGKFETFHRRLAKIIDIFTTLKTYSVLQDSTIEGLEDMATKYQGIVATIKKKEYNFLDQRKMDFDQDYEEFCKQTNDLHNELRKFMDVTFAKIQNTNQALRMLKKFERLNIPNLGIDDKYQLILENYGADIDMISKLYTKQKYDPPLARNQPPIAGKILWARQLFHRIQQPMQLFQQHPAVLSTAEAKPIIRSYNRMAKVLLEFEVLFHRAWLRQIEEIHVGLEASLLVKAPGTGELFVNFDPQILILFRETECMAQMGLEVSPLATSLFQKRDRYKRNFSNMKMMLAEYQRVKSKIPAAIEQLIVPHLAKVDEALQPGLAALTWTSLNIEAYLENTFAKIKDLELLLDRVNDLIEFRIDAILEEMSSTPLCQLPQEEPLTCEEFLQMTKDLCVNGAQILHFKSSLVEEAVNELVNMLLDVEVLSEEESEKISNENSVNYKNESSAKREEGNFDTLTSSINARANALLLTTVTRKKKETEMLGEEARELLSHFNHQNMDALLKVTRNTLEAIRKRIHSSHTINFRDSNSASNMKQNSLPIFRASVTLAIPNIVMAPALEDVQQTLNKAVECIISVPKGVRQWSSELLSKKKIQERKMAALQSNEDSDSDVEMGENELQDTLEIASVNLPIPVQTKNYYKNVSENKEIVKLVSVLSTIINSTKKEVITSMDCFKRYNHIWQKGKEEAIKTFITQSPLLSEFESQILYFQNLEQEINAEPEYVCVGSIALYTADLKFALTAETKAWMVVIGRHCNKKYRSEMENIFMLIEEFNKKLNRPIKDLDDIRIAMAALKEIREEQISIDFQVGPIEESYALLNRYGLLIAREEIDKVDTLHYAWEKLLARAGEVQNKLVSLQPSFKKELISAVEVFLQDCHQFYLDYDLNGPMASGLKPQEASDRLIMFQNQFDNIYRKYITYTGGEELFGLPATQYPQLLEIKKQLNLLQKIYTLYNSVIETVNSYYDILWSEVNIEKINNELLEFQNRCRKLPRALKDWQAFLDLKKIIDDFSECCPLLEYMASKAMMERHWERITTLTGHSLDVGNESFKLRNIMEAPLLKYKEEIEDICISAVKERDIEQKLKQVINEWDNKTFTFGSFKTRGELLLRGDSTSEIIANMEDSLMLLGSLLSNRYNMPFKAQIQKWVQYLSNSTDIIESWMTVQNLWIYLEAVFVGGDIAKQLPKEAKRFSNIDKSWVKIMTRAHEVPSVVQCCVGDETLGQLLPHLLDQLEICQKSLTGYLEKKRLCFPRFFFVSDPALLEILGQASDSHTIQAHLLNVFDNIKSVKFHEKIYDRILSISSQEGETIELDKPVMAEGNVEVWLNSLLEESQSSLHLVIRQAAANIQETGFQLTEFLSSFPAQVGLLGIQMIWTRDSEEALRNAKFDKKIMQKTNQAFLELLNTLIDVTTRDLSSTERVKYETLITIHVHQRDIFDDLCHMHIKSPMDFEWLKQCRFYFNEDSDKMMIHITDVAFI

SEQ ID NO: 101 - protein, 1433 aa, Homo sapiens
MTFRATDSEFDLTNIEEYAENSALSRLNNIKAKQRVSYVTSTENESDTQILTFRHITKAQEKTRKRQQPIKLEPLPVLKVYQDHKQPEYIHEQNRFQLMTAGIIKRPVSIAKKSFATSSTQFLEHQDAVKKMQIHRPYVEVFSPSPPKLPHTGIGKRGLFGTRSSAYPKYTFHDREEVVKANIRDPLQIIKIIRENEHLGFLYMIPAVPRSSIEYDTYNLKVVSYENINKNDYYTISQRAVTHIYNEDIEFIEIDRWEQEYLYHRELTKIPIFSLFRKWKAFSVWRKNVRSKKITGCQKSLQKNLFIVNPHLRPALLKINELCYHLSFMGLCYIEKCHTYTLQEFKAAQVIRLAEVTERLGEFRNEAKYVVRRACRFALRAAGFVPDDCAFGPFEDYHKVQSSGSFINTPHELPTYGDSEKMTYTEQASKRHYCMRLTCFIRLNDYLIENTMHILTVNAVNSLLNHLTDKLKRTPSADVIQKWITEEKPEVPDKKGTLMVEKQEEDESLIPMFLTELMLTVQSLLFEPSLEDFLDGILGAVNHCQNTVLSVPNLVPDSYFDAFTSPYINNKLEGKTCGTGPSLAAVFEDDKNFHTIISQIKETIQAAFESARIYAATFEKFQIFFKENESLDLQALKLQEPDINFFSEQLEKYHKQHKDAVALRPTRNVGLLLIDTRLLREKLIPSPLRCLEVLNFMLPRQSKKKVDAIIFEAQDAEYKLEFVPTTTTEYVHSLLFLDEIQERIESLEDEGNIVTQMYKLMEQYQVPTPPEDFAVFATMKPSIVAVRNAIDKSVGDRESSIKQFCVHLGSDLEELNNEVNEVKLQAQDPQILDISADQDKIRLILNNLQSVLADLQKRAFQYKSYQKNFKVEVSKFEALEEVSAELKLKQLLWDSFSEWDKLQQEWLKSKFDCLDPEVLNGQVSKYAKFVTQLEKGLPPNSVVPQLKYKVEKMKEKLPVIIDLRNPTLKARHWAAIEQTVDATLVDAEIPLTLERLSQLHVFDFGQEIQDISGQASGEAALEAILKKVEDSWKTTEFVILPHRDSKDVFILGGTDDIQVLLDDSTINVATLASSRYLGPLKTRVDEWQKQLALFNQTLEEWLTCQRNWLYLESIFNAPDIQRQLPAEAKMFLQVDKSWKEIMRKVNRLPNALRAATQPGLLETFQNNNALLDQIQKCLEAYLESKRVIFPRFYFLSNDELLEILAQTRNPQAVQPHLRKCFDSISKLEFALMPPAEGKIPGIDGEPEKVYTNDILAMLSPEGERVSLGKGLKARGNVEEWLGKVEEAMFTSLRRLCKAAIADYQGKLRTDWVVAGHPSQVILTVSQIMWCRDLTECLETEHSNHIQALKNFEKVNFERLNALAAIVQGSLPKLHRNILTALITIDVHARDIVTELVQSKVETVESFDWQRQLRYYWDIDLDNCVARMALSQYT

SEQ ID NO: 102 - protein, 1289 aa, Homo sapiens
MSSEQDKSASKEKSKKPVRFLPQLSMEKLASKEKFKAPARALPQLSMVSTKPHWQQAAPSFHLSVKQDDESPEPFSVKNEQSHAEYMERFGKKGKLPHQVDDSYVGPSTSKSKGKSPHKERENFRSTLVNVIMQQDADLDSAVPDGSTIPKPTASAIEKDILRYYYYIHHGIDTDHVAPMEDSWLEHVLDLVPQHLKVFTDSIVTLSDEMREDYLLSVRKSIVDFVLKDPREKGDDKKTDELPAHRAEMEILPKPWRKSFLAASSYIRDHLNAMNPTMLAVLDLWHTNFKKLRLVDIKEFHNCQDALELSSFQNIIMRHMDSAKETLLKMWFPEVQNIYYQGNKKKQLPTGDSSAKLESFFNCAAALMTLQLQDLTLVSMQDFTDLIAQPPDSVRAFEHPGFIMRLILDNDTIKFEPELSDYIDIFLNVYDVMIKAVSFVPRVETKLYSKWESKSKPTTLKPIILNEIVDAHKEKIKEVIMKESVAPTEHLRLYDKYDFLITRKAERDVDNFLAENHSYEKIIDEICKYQKLIEEIQYTSIKTIRLGMFEMHCEELIRALVKRADIICGKLLAKMFRDHQEVNTRLCDEFERIAEKALSTPPNTAELMEMKAYIQKVEVTDMIELEQRLVDSKNCLAFLIEYVNFSPADMRLNNSVFQWYGRMGEIFEEHRKIIKEKIEQYQEGLKLRCERFVEELESYAKQSEEFYSFGDLQDVQRYLKKAQILNGKLDLAADKIEQFNAEEEAFGWLPSVYPQRKKIQDGLNPYLRLYETAVEFSSNYRAWTEGPYHKVNPDQVEADIGNYWRGLYKLEKTFHDSPYALAMTKKVRSKVEDFKQHIPLIQVICNPGLRPRHWEAMSAIVGYPLQPSDDSTVSSFLDMNLEPYIDRFEGISEAASKEYSLEKAMEKMITEWDAVEFVIHSYRETGTFILASVDEIQMLLDDHIIKTQTMRGSPFIKPYEKQMREWEGKLLLLQEILDEWLKVQATWLYLEPIFSSPDIMSQMPEEGRRFTAVDKTWRDIMRSVMQDKHVLTVVTIDRMLERLKKSNELLELILKGLNEYLEKKRLFFPRFFFLSNDELLEILSETKDPTRVQPHLKKCFEGIAKVEFTETLDITHMKSSEGEVVELIEIISTAKARGQVEKWLVELERVMINSIHKVTGDATFAYTKYERINWVRDWPGQTVLCVSQIFWTKEVQTAIPMGIKALEQYLKTCNRQIDDIVTLVRGKLSMQNRVTLGALVVLDVHARDVLSSLVKKNISDDSDFEWLSQLRYYWQENHLETKMINAGLR

SEQ ID NO: 103 - protein, 1807 aa, Homo sapiens
MMKLYIDNAAPDKLKGLCIFFVRCRNDVAINVKTIQEEALFTVLDASKGLLNGIRDMLANIFLPAVLATNNWGALNQSKQGESEKHIFTETINRYLSFLDGARISIEGTVKLKTIDNVNFSKLHTFEEVTAAASNSETVHQLEEVLMVWYKQIEQVLIESEQMRKEAGDSGPLTELEHWKRMSAKFNYIIEQIKGPSCKAVINVLNVAHSKLLKNWRDLDARITDTANESKDNVRYLYTLEKVCQPLYNHDLVSMAHGIQNLINAIRMIHGVSRYYNTSERMTSLFIKVTNQMVTACKAYITDGGLNHVWDQETPVVLKKIQDCIFLFKEYQASFHKTRKLISESSGEKSFEVSEMYIFGKFEAFCKRLEKITEMITVVQTYSTLSNSTIEGIDIMAIKFRNIYQGVKKKQYDILDPRRTEFDTDFLDFMTKINGLEVQIQAFMNSSFGKILSSQQALQLLQRFQKLNIPCLGLEINHTIERILQYYVAELDATKKLYHSQKDDPPLARNMPPIAGKILWVRQLYRRISEPINYFFKNSDILSSPDGKAVIRQYNKISYVLVEFEVVYHTAWIREISQLHYALQATLFVRHPETGKLLVNFDPKILEVVRETKCMIKMKLDVPEQAKRLLKLESKLKADKLYLQGLLQYYDELCQEVPSVFVNLMTPKMKKVESVLRQGLTVLTWSSLTLESFFQEVELVLDMFNQLLKKISDLCEMHIDTVLKEIAKTVLISLPESGATKVEDMLTLNETYTKEWADILNHKSKHVEEAVRELISIFEQIYEVKYTGKVGKQSEQRKHVVFGSETGEGENNDYEANIVNEFDTHDKEDEFKKECKEVFAFFSHQLLDSLQKATRLSLDTMKRRIFVASLYGRKQSEDIISFIKSEVHLAIPNVVMIPSLDDIQQAINRMIQLTLEVSRGVAHWGQQQIRPIKSVIPSPTTTDVTHQNTGKLLKKEERSFEEAIPARKLKNFYPGVAEHKDISKLVLLLSSSVNSLRKAAHEALQDFQKYKTLWTEDRDVKVKEFLANNPSLTEIRSEILHYATFEQEIDELKPIIVVGALELHTEPMKLALSIEAKAWKMLLCRYLNEEYKKKMSYMIAFINEYLKKLSRPIRDLDDVRFAMEALSCIRDNEIQMDMTLGPIEEAYAILNRFEVEVTKEESEAVDTLRYSFNKLQSKAVSVQEDLVQVQPKFKSNLLESVEVFREDVINFAEAYELEGPMVPNIPPQEASNRLQIFQASFDDLWRKFVTYSSGEQLFGLPVTDYEVLHKTRKELNLLQKLYGLYDTVMSSISGYYEILWGDVDIEKINAELLEFQNRCRKLPKGLKDWQAFLDLKKRIDDFSESCPLLEMMTNKAMKQRHWDRISELTGTPFDVESDSFCLRNIMEAPLLKHKDDIEDICISAIKEKDIEAKLTQVIENWTNQNLSFAAFKGKGELLLKGTESGEIITLMEDSLMVLGSLLSNRYNAPFKKNIQNWVYKLSTSSDIIEEWLVVQNLWVYLEAVFVGGDIAKQLPQEAKRFQNIDKSWIKIMQRAHENPNVINCCVGDETMGQLLPHLHEQLEVCQKSLTGYLEKKRLLFPRFFFVSDPVLLEILGQASDSHTIQPHLPAVSDNINEVTFHAKDYDRIMAVISREGEKIVLDNSVMAKGPVEIWLLDLLKMQMSSLHNIIRSAFYQISDSGFQLLPFLSHFPAQVGLLGIQMLWTHDSEEALRNAKDDRKIMQVTNQKFLDILNTLISQTTHDLSKFDRVKFETLITIHVHQRDIFDDLVKMHIKSPTDFEWLKQSRFYFKEDLDQTVVSITDVDFI

SEQ ID NO: 104 - protein, 1831 aa, Homo sapiens
MRLAEERAALAAENADGEPGADRRLRLLGTYVAMSLRPAAGAWERCAGSAEAEQLLQAFLGRDAAEGPRPLLVVRPGPRGLAIRPGLEVGPESGLAGAKALFFLRTGPEPPGPDSFRGAVVCGDLPAAPLEHLAALFSEVVLPVLANEKNRLNWPHMICEDVRRHAHSLQCDLSVILEQVKGKTLLPLPAGSEKMEFADSKSETVLDSIDKSVIYAIESAVIKWSYQVQVVLKRESSQPLLQGENPTPKVELEFWKSRYEDLKYIYNQLRTITVRGMAKLLDKLQSSYFPAFKAMYRDVVAALAEAQDIHVHLIPLQRHLEALENAEFPEVKPQLRPLLHVVCLIWATCKSYRSPGRLTVLLQEICNLLIQQASNYLSPEDLLRSEVEESQRKLQVVSDTLSFFKQEFQDRRENLHTYFKENQEVKEWDFQSSLVFVRLDGFLGQLHVVEGLLKTALDFHKLGKVEFSGVRGNALSQQVQQMHEEFQEMYRLLSGSSSDCLYLQSTDFENDVSEFNQKVEDLDRRLGTIFIQAFDDAPGLEHAFKLLDIAGNLLERPLVARDTSDKYLVLIQMFNKDLDAVRMIYSQHVQEEAELGFSPVHKNMPTVAGGLRWAQELRQRIQGPFSNFGRITHPCMESAEGKRMQQKYEDMLSLLEKYETRLYEDWCRTVSEKSQYNLSQPLLKRDPETKEITINFNPQLISVLKEMSYLEPREMKHMPETAAAMFSSRDFYRQLVANLELMANWYNKVMKTLLEVEFPLVEEELQNIDLRLRAAEETLNWKTEGICDYVTEITSSIHDLEQRIQKTKDNVEEIQNIMKTWVTPIFKTKDGKRESLLSLDDRHDRMEKYYNLIKESGLKIHALVQENLGLFSADPTSNIWKTYVNSIDNLLLNGFFLAIECSLKYLLENTECKAGLTPIFEAQLSLAIPELVFYPSLESGVKGGFCDIVEGLITSIFRIPSLVPRLSPQNGSPHYQVDLDGIPDLANMRRTLMERVQRMMGLCCGYQSTFSQYSYLYVEDRKEVLGQFLLYGHILTPEEIEDHVEDGIPENPPLLSQFKVQIDSYETLYEEVCRLEPIKVFDGWMKIDIRPFKASLLNIIKRWSLLFKQHLVDHVTHSLANLDAFIKKSESGLLKKVEKGDFQGLVEIMGHLMAVKERQSNTDEMFEPLKQTIELLKTYEQELPETVFKQLEELPEKWNNIKKVAITVKQQVAPLQANEVTLLRQRCTAFDAEQQQFWEQFHKEAPFRFDSIHPHQMLDARHIEIQQMESTMASISESASLFEVNVPDYKQLRQCRKEVCQLKELWDTIGMVTSSIHAWETTPWRNINVEAMELECKQFARHIRNLDKEVRAWDAFTGLESTVWNTLSSLRAVAELQNPAIRERHWRQLMQATGVSFTMDQDTTLAHLLQLQLHHYEDEVRGIVDKAAKEMGMEKTLKELQTTWAGMEFQYEPHPRTNVPLLCSDEDLIEVLEDNQVQLQNLVMSKYVAFFLEEVSGWQKKLSTVDAVISIWFEVQRTWTHLESIFTGSEDIRAQLPQDSKRFEGIDIDFKELAYDAQKIPNVVQTTNKPGLYEKLEDIQGRLCLCEKALAEYLDTKRLAFPRFYFLSSSDLLDILSNGTAPQQVQRHLSKLFDNMAKMRFQLDASGEPTKTSLGMYSKEEEYVAFSEPCDCSGQVEIWLNHVLGHMKATVRHEMTEGVTAYEEKPREQWLFDHPAQVALTCTQIWWTTEVGMAFARLEEGYESAMKDYYKKQVAQLKTLITMLIGQLSKGDRQKIMTICTIDVHARDVVAKMIAQKVDNAQAFLWLSQLRHRWDDEVKHCFANICDAQFL

SEQ ID NO: 105 - protein, 1793 aa, Homo sapiens
MVPEEVEVEIDEIPVLSEEGEEEEETYSQKVESVDKVRAKRVSLRTESLGQPLNREDEEMDKEISEKLPSKRTAKHIMEKMHLHMLCTPLPEEFLDQNVVFFLRNTKEAISEATDMKEAMEIMPETLEYGIINANVLHFLKNIICQVFLPALSFNQHRTSTTVGVTSGEVSNSSEHESDLPPMPGEAVEYHSIQLIRDEFLMNVQKFASNIQRTMQQLEGEIKLEMPIISVEGEVSDLAADPETVDILEQCVINWLNQISTAVEAQLKKTPQGKGPLAEIEFWRERNATLSALHEQTKLPIVRKVLDVIKESDSMLVANLQPVFTELFKFHTEASDNVRFLSTVERYFKNITHGSGFHVVLDTIPAMMSALRMVWIISRHYNKDERMIPLMERIAWEIAERVCRVVNLRTLFKENRASAQSKTLEARNTLRLWKKAYFDTRAKIEASGREDRWEFDRKRLFERTDYMATICQDLSDVLQILEEFYNIFGPELKAVTGDPKRIDDVLCRVDGLVTPMENLTFDPFSIKSSQFWKYVMDEFKIEVLIDIINKIFVQNLENPPLYKNHPPVAGAIYWERSLFFRIKHTILRFQEVQEILDSDRGQEVKQKYLEVGRTMKEYEDRKYEQWMEVTEQVLPALMKKSLLTKSSIATEEPSTLERGAVFAINFSPALREIINETKYLEQLGFTVPELARNVALQEDKFLRYTAGIQRMLDHYHMLIGTLNDAESVLLKDHSQELLRVFRSGYKRLNWNSLGIGDYITGCKQAIGKFESLVHQIHKNADDISSRLTLIEAINLFKYPAAKSEEELPGVKEFFEHIERERASDVDHMVRWYLAIGPLLTKVEGLVVHTNTGKAPKLASYYKYWEKKIYEVLTKLILKNLQSFNSLILGNVPLFHTETILTAPEIILHPNTNEIDKMCFHCVRNCVEITKHFVRWMNGSCIECPPQKGEEEEVVIINFYNDISLNPQIIEQAVMIPQNVHRILINLMKYLQKWKRYRPLWKLDKAIVMEKFAAKKPPCVAYDEKLQFYSKIAYEVMRHPLIKDEHCIRLQLRHLANTVQENAKSWVISLGKLLNESAKEELYNLHEEMEHLAKNLRKIPNTLEDLKFVLATIAEIRSKSLVMELRYRDVQERYRTMAMYNLFPPDAEKELVDKIESIWSNLFNDSVNVEHALGDIKRTFTELTRGEIMNYRVQIEEFAKRFYSEGPGSVGDDLDKGVELLGVYERELARHEKSRQELANAEKLFDLPITMYPELLKVQKEMSGLRMIYELYEGLKVAKEEWSQTLWINLNVQILQEGIEGFLRALRKLPRPVRGLSVTYYLEAKMKAFKDSIPLLLDLKNEALRDRHWKELMEKTSVFFEMTETFTLENMFAMELHKHTDVLNEIVTAAIKEVAIEKAVKEILDTWENMKFTVVKYCKGTQERGYILGSVDEIIQSLDDNTFNLQSISGSRFVGPFLQTVHKWEKTLSLIGEVIEIWMLVQRKWMYLESIFIGGDIRSQLPEEAKKFDNIDKVFKRIMGETLKDPVIKRCCEAPNRLSDLQNVSEGLEKCQKSLNDYLDSKRNAFPRFFFISDDELLSILGSSDPLCVQEHMIKMYDNIASLRFNDGDSGEKLVSAMISAEGEVMEFRKILRAEGRVEDWMTAVLNEMRRTNRLITKEAIFRYCEDRSRVDWMLLYQGMVVLAASQVWWTWEVEDVFHKAQKGEKQAMKNYGRKMHRQIDELVTRITMPLSKNDRKKYNTVLIIDVHARDIVDSFIRGSILEAREFDWESQLRFYWDREPDELNIRQCTGTFG

SEQ ID NO: 106 - protein, 1854 aa, Homo sapiens
MAAQVAAREARDFREAPTLRLTSGAGLEAVGAVELEEEEENEEEAAARRARSFAQDARVRFLGGRLAMMLGFTEEKWSQYLESEDNRQVLGEFLESTSPACLVFSFAASGRLAASQEIPRDANHKLVFISKKITESIGVNDFSQVVLFGELPALSLGHVSAFLDEILVPVLSNKNNHKSWSCFTSQDMEYHIEVMKKKMYIFRGKMSRRTLLPIPTVAGKMDLDQNCSENKPPSNERIILHAIESVVIEWSHQIQEIIERDSVQRLLNGLHLSPQAELDFWMMRRENLSCIYDQLQAPVVLKMVKILTTKQSSYFPTLKDIFLAVENALLEAQDVELYLRPLRRHIQCLQETEFPQTRILIAPLFHTICLIWSHSKFYNTPARVIVLLQEFCNLFINQATAYLSPEDLLRGEIEESLEKVQVAVNILKTFKNSFFNYRKKLASYFMGRKLRPWDFQSHLVFCRFDKFLDRLIKIEDIFATTLEFEKLERLEFGGTKGAILNGQVHEMSEELMELCKLFKQSTYDPSDCTNMEFESDYVAFKSKTLEFDRRLGTIICEAFFNCNGLEAAFKLLTIFGNFLEKPVVMEIFSLHYSTLVHMFNTELDVCKQLYNEHMKQIECGHVVLNKNMPFTSGNMKWAQQVLQRLQMFWSNFASLRYLFLGNPDHALVYQKYVEMTTLLDQFESRIYNEWKSNVDEICEFNLNQPLVKFSAINGLLCVNFDPKLVAVLREVKYLLMLKKQDIPDSALAIFKKRNTILKYIGNLDLLVQGYNKLKQTLLEVEYPLIEDELRAIDEQLTAATTWLTWQDDCWGYIERVRAATSELEHRVERTQKNVKVIQQTMRGWARCVLPPRREHRREAAFTLEDKGDLFTKKYKLIQGDGCKIHNLVEENRKLFKANPSLDTWKIYVEFIDDIVVEGFFQAIMHDLDFFLKNTEKQLKPAPFFQAQMILLPPEIVFKPSLDREAGDGFYDLVEEMLCNSFRMSAQMNRIATHLEIKNYQNDMDNMLGLAEVRQEIMNRVVNVINKVLDFRNTLETHTYLWVDDRAEFMKHFLLYGHAVSSDEMDAHANEEIPEQPPTLEQFKEQIDIYEALYVQMSKFEDFRVFDSWFKVDMKPFKVSLLTIIKKWSWMFQEHLLRFVIDSLNELQEFIKETDSGLQRELNEGDHDGLVDIMVHLLAVRSRQRATDELFEPLKETITLLESYGQKMPEQVYIQLEELPERWETTKKIAATVRHEVSPLHNAEVTLIRKKCILFDAKQAEFRERFRHYAPLGFNAENPYTALDKANEELEALEEEMLQMQESTRLFEVALPEYKQMKQCRKEIKLLKGLWDVIIYVRRSIDNWTKTQWRQIHVEQMDVELRRFAKEIWSLNKEVRVWDAYTGLEGTVKDMTASLRAITELQSPALRDRHWHQLMKAIGVKFLINEATTLADLLALRLHRVEDDVRRIVDKAVKELGTEKVITEISQTWATMKFSYEVHYRTGIPLLKSDEQLFETLEHNQVQLQTLLQSKYVEYFIEQVLSWQNKLNIADLVIFTWMEVQRTWSHLESIFVCSEDIRIQLVKDARRFDGVDAEFKELMFKTAKVENVLEATCRPNLYEKLKDLQSRLSLCEKALAEYLETKRIAFPRFYFVSSADLLDILSKGAQPKQVTCHLAKLFDSIADLQFEDNQDVSAHRAVGMYSKEKEYVPFQAECECVGHVETWLLQLEQTMQETVRHSITEAIVAYEEKPRELWIFDFPAQVALTSSQIWWTTDVGIAFSRLEEGYETALKDFHKKQISQLNTLITLLLGELPPGDRQKIMTICTIDVHARDVVAKLISQKVVSPQAFTWLSQLRHRWEDTQKHCFVNICDAQFQ

SEQ ID NO: 107 - protein, 1214 aa, Homo sapiens
MSDANKAAIAAEKEALNLKLPPIVHLPENIGVDTPTQSKLLKYRRSKEQQQKINQLVIDGAKRNLDRTLGKRTPLLPPPDYPQTMTSEMKKKGFNYIYMKQCVESSPLVPIQQEWLDHMLRLIPESLKEGKEREELLESLINEVSSDFENSMKRYLVQSVLVKPPVKSLEDEGGPLPESPVGLDYSNPWHSSYVQARNQIFSNLHIIHPTMKMLLDLGYTTFADTVLLDFTGIRAKGPIDCESLKTDLSIQTRNAEEKIMNTWYPKVINLFTKKEALEGVKPEKLDAFYSCVSTLMSNQLKDLLRRTVEGFVKLFDPKDQQRLPIFKIELTFDDDKMEFYPTFQDLEDNVLSLVERIAEALQNVQTIPSWLSGTSTPVNLDTELPEHVLHWAVDTLKAAVHRNLEGARKHYETYVEKYNWLLDGTAVENIETFQTEDHTFDEYTEFIEKFLSLASEIMLLPQWIHYTMVRLDCEDLKTGLTNKAKAFANILLNDIASKYRKENECICSEFEAIKEHALKVPETTEEMMDLISYVEKARTVGIEELILRIQESKRQMSYFLDVFLFPQEDLALNATVLMWPRKINPIFDENDELIENAKHKKENELMAKREKLILEIEKESRRMEEFTEFAELERMQQYVTDVRQLQKRIQESEEAVQFINKEEELFKWELTKYPELDKLKVNIEPYQKFFNFVLKWQRSEKRWMDGGFLDLNGESMEADVEEFSREIFKTLKFFQTKLKKELQEKRKAARKRSLEEEKIEEEPKDNATITMCRMRARHWKQISEIVGYDLTPDSGTTLRKVLKLNLTPYLEQFEVISAGASKEFSLEKAMNTMIGTWEDIAFHISLYRDTGVCILSSVDEIQAILDDQIIKTQTMRGSPFIKPFEHEIKAWEDRLIRIQETIDEWLKVQAQWLYLEPIFCSEDIMQQMPEEGRQFQTVDRHWRDIMKFCAKDPKVLAATSLTGLLEKLQNCNELLEKIMKGLNAYLEKKRLFFPRFFFLSNDEMLEILSETKDPLRVQPHLKKCFEGIAKLEFLPNLDIKAMYSSEGERVELIALISTSAARGAVEKWLIQVEDLMLRSVHDVIAAARLAYPESARRDWVREWPGQVVLCISQMFWTSETQEVISGGTEGLKKYYKELQNQLNEIVELVRGKLSKQTRTTLGALVTIDVHARDVVMDMIKMGVSHDTDFLWLAQLRYYWENENARVRIINCNVK

SEQ ID NO: 108 - protein, 200 aa, Homo sapiens
MGRRSQWIWAMRCQMLVPVLSLHIGLARALGCGCIASKIECLIRCNAPFPLLDAVGSVASQELQSLTGTVGVTSGAAAYPRWNLARARAPPHLPGTQDPLRRVRDPTPIVASSPGRRRGSWSGGYGQEASEPGVVGLCCAVLPIHPSLALAGVGGPDLRRFQEGPQRPSDHGAAEKHMETFIPIDLTTENQEMDKEETKT

SEQ ID NO: 109 - protein, 1794 aa, Homo sapiens
MTMAPDVRLEYLEEVASIVLKFKPDKWSKLIGAEENVALFTEFFEKPDVQVLVLTLNAAGMIIPCLGFPQSLKSKGVYFIKTKSENINKDNYRARLLYGDISPTPVDQLIAVVEEVLSSLLNQSENMAGWPQVVSEDIVKQVHRLKNEMFVMSGKIKGKTLLPIPEHLGSLDGTLESMERIPSSLDNLLLHAIETTIIDWSHQIRDVLSKDSAQALLDGLHPLPQVEFEFWDARLLNLKCIHEQLNRPKVNKIVEILEKAKSCYWPALQNVYTNVTEGLKEANDIVLYLKPLRILLEEMEQADFTMLPTFIAKVLDTICFIWATSEYYNTPARIIVILQEFCNQIIEMTRTFLSPEEVLKGLQGEIEEVLSGISLAVNVLKELYQTYDFCCVNMKLFFKDKEPVPWEFPSSLAFSRINSFFQRIQTIEELYKTAIEFLKLEKIELGGVRGNLLGSLVTRIYDEVFELVKVFADCKYDPLDPGDSNFDRDYADFEIKIQDLDRRLATIFCQGFDDCSCIKSSAKLLYMCGGLMERPLILAEVAPRYSVMLELFDAELDNAKILYDAQMAASEEGNIPLIHKNMPPVAGQLKWSLELQERLEVSMKHLKHVEHPVMSGAEAKLTYQKYDEMMELLRCHREKIYQQWVAGVDQDCHFNLGQPLILRDAASNLIHVNFSKALVAVLREVKYLNFQQQKEIPDSAESLFSENETFRKFVGNLELIVGWYNEIKTIVKAVEFLLIKSELEAIDVKLLSAETTLFWNGEGVFQYIQEVREILHNLQNRMQKAKQNIEGISQAMKDWSANPLFERKDNKKEALLDLDGRIANLNKRYAAVRDAGVKIQAMVAENAELFRADTLSLPWKDYVIYIDDMVLDEFDQFIRKSLSFLMDNMVIDESIAPLFEIRMELDEDGLTFNPTLEVGSDRGFLALIEGLVNDIYNVARLIPRLAKDRMNYKMDLEDNTDLIEMREEVSSLVINAMKEAEEYQDSFERYSYLWTDNLQEFMKNFLIYGCAVTAEDLDTWTDDTIPKTPPTLAQFQEQIDSYEKLYEEVSKCENTKVFHGWLQCDCRPFKQALLSTIRRWGFMFKRHLSNHVTNSLADLEAFMKVARMGLTKPLKEGDYDGLVEVMGHLMKVKERQAATDNMFEPLKQTIELLKTYGEEMPEEIHLKLQELPEHWANTKKLAIQVKLTVAPLQANEVSILRRKCQQFELKQHEFRERFRREAPFSFSDPNPYKSLNKVFLLKGIMEALSKSGGLFEVPVPDYKQLKACHREVRLLKELWDMVVVVNTSIEDWKTTKWKDINVEQMDIDCKKFAKDMRSLDKEMKTWDAFVGLDNTVKNVITSLRAVSELQNPAIRERHWQQLMQATQVKFKMSEETTLADLLQLNLHSYEDEVRNIVDKAVKESGMEKVLKALDSTWSMMEFQHEPHPRTGTMMLKSSEVLVETLEDNQVQLQNLMMSKYLAHFLKEVTSWQQKLSTADSVISIWFEVQRTWSHLESIFIGSEDIRTQLPGDSQRFDDINQEFKALMEDAVKTPNVVEATSKPGLYNKLEALKKSLAICEKALAEYLETKRLAFPRFYFVSSADLLDILSNGNDPVEVSRHLSKLFDSLCKLKFRLDASDKPLKVGLGMYSKEDEYMVFDQECDLSGQVEVWLNRVLDRMCSTLRHEIPEAVVTYEEKPREQWILDYPAQIWWTTEVGLAFARLEEGYENAIKDYNKKQISQLNVLITLLIGNLNAGDRMKIMTICTIDVHARDVVAKMIVESSQAFTWQAQLRHRWDEEKRHCFANICDAQIQ

SEQ ID NO: 110 - protein, 736 aa, Adeno-associated virus
MAADGYLPDWLEDNLSEGIREWWDLKPGAPKPKANQQKQDDGRGLVLPGYKYLGPFNGLDKGEPVNAADAAALEHDKAYDQQLKAGDNPYLRYNHADAEFQERLQEDTSFGGNLGRAVFQAKKRVLEPLGLVEEGAKTAPGKKRPVEQSPQEPDSSSGIGKTGQQPAKKRLNFGQTGDSESVPDPQPLGEPPATPAAVGPTTMASGGGAPMADNNEGADGVGNASGNWHCDSTWLGDRVITTSTRTWALPTYNNHLYKQISSASTGASNDNHYFGYSTPWGYFDFNRFHCHFSPRDWQRLINNNWGFRPKRLNFKLFNIQVKEVTTNDGVTTIANNLTSTVQVFSDSEYQLPYVLGSAHQGCLPPFPADVFMIPQYGYLTLNNGSQAVGRSSFYCLEYFPSQMLRTGNNFTFSYTFEEVPFHSSYAHSQSLDRLMNPLIDQYLYYLNRTQNQSGSAQNKDLLFSRGSPAGMSVQPKNWLPGPCYRQQRVSKTKTDNNNSNFTWTGASKYNLNGRESIINPGTAMASHKDDEDKFFPMSGVMIFGKESAGASNTALDNVMITDEEEIKATNPVATERFGTVAVNFQSSSTDPATGDVHAMGALPGMVWQDRDVYLQGPIWAKIPHTDGHFHPSPLMGGFGLKNPPPQILIKNTPVPANPPAEFSATKFASFITQYSTGQVSVEIEWELQKENSKRWNPEVQYTSNYAKSANVDFTVDNNGLYTEPRPIGTRYLTRPL

SEQ ID NO: 111 - protein, 735 aa, Adeno-associated virus [sequence omitted]

SEQ ID NO: 112 - protein, 736 aa, Adeno-associated virus
MAADGYLPDWLEDNLSEGIREWWALKPGVPQPKANQQHQDNRRGLVLPGYKYLGPGNGLDKGEPVNEADAAALEHDKAYDQQLKAGDNPYLKYNHADAEFQERLQEDTSFGGNLGRAVFQAKKRILEPLGLVEEAAKTAPGKKGAVDQSPQEPDSSSGVGKSGKQPARKRLNFGQTGDSESVPDPQPLGEPPAAPTSLGSNTMASGGGAPMADNNEGADGVGNSSGNWHCDSQWLGDRVITTSTRTWALPTYNNHLYKQISSQSGASNDNHYFGYSTPWGYFDFNRFHCHFSPRDWQRLINNNWGFRPKKLSFKLFNIQVRGVTQNDGTTTIANNLTSTVQVFTDSEYQLPYVLGSAHQGCLPPFPADVFMVPQYGYLTLNNGSQAVGRSSFYCLEYFPSQMLRTGNNFQFSYTFEDVPFHSSYAHSQSLDRLMNPLIDQYLYYLNRTQGTTSGTTNQSRLLFSQAGPQSMSLQARNWLPGPCYRQQRLSKTANDNNNSNFPWTAASKYHLNGRDSLVNPGPAMASHKDDEEKFFPMHGNLIFGKEGTTASNAELDNVMITDEEEIRTTNPVATEQYGTVANNLQSSNTAPTTGTVNHQGALPGMVWQDRDVYLQGPIWAKIPHTDGHFHPSPLMGGFGLKHPPPQIMIKNTPVPANPPTTFSPAKFASFITQYSTGQVSVEIEWELQKENSKRWNPEIQYTSNYNKSVNVDFTVDTNGVYSEPRPIGTRYLTRNL

SEQ ID NO: 113 - protein, 734 aa, Adeno-associated virus
MTDGYLPDWLEDNLSEGVREWWALQPGAPKPKANQQHQDNARGLVLPGYKYLGPGNGLDKGEPVNAADAAALEHDKAYDQQLKAGDNPYLKYNHADAEFQQRLQGDTSFGGNLGRAVFQAKKRVLEPLGLVEQAGETAPGKKRPLIESPQQPDSSTGIGKKGKQPAKKKLVFEDETGAGDGPPEGSTSGAMSDDSEMRAAAGGAAVEGGQGADGVGNASGDWHCDSTWSEGHVTTTSTRTWVLPTYNNHLYKRLGESLQSNTYNGFSTPWGYFDFNRFHCHFSPRDWQRLINNNWGMRPKAMRVKIFNIQVKEVTTSNGETTVANNLTSTVQIFADSSYELPYVMDAGQEGSLPPFPNDVFMVPQYGYCGLVTGNTSQQQTDRNAFYCLEYFPSQMLRTGNNFEITYSFEKVPFHSMYAHSQSLDRLMNPLIDQYLWGLQSTTTGTTLNAGTATTNFTKLRPTNFSNFKKNWLPGPSIKQQGFSKTANQNYKIPATGSDSLIKYETHSTLDGRWSALTPGPPMATAGPADSKFSNSQLIFAGPKQNGNTATVPGTLIFTSEEELAATNATDTDMWGNLPGGDQSNSNLPTVDRLTALGAVPGMVWQNRDIYYQGPIWAKIPHTDGHFHPSPLIGGFGLKHPPPQIFIKNTPVPANPATTFSSTPVNSFITQYSTGQVSVQIDWEIQKERSKRWNPEVQFTSNYGQQNSLLWAPDAAGKYTEPRAIGTRYLTHHL

SEQ ID NO: 114 - protein, 724 aa, Adeno-associated virus
MSFVDHPPDWLEEVGEGLREFLGLEAGPPKPKPNQQHQDQARGLVLPGYNYLGPGNGLDRGEPVNRADEVAREHDISYNEQLEAGDNPYLKYNHADAEFQEKLADDTSFGGNLGKAVFQAKKRVLEPFGLVEEGAKTAPTGKRIDDHFPKRKKARTEEDSKPSTSSDAEAGPSGSQQLQIPAQPASSLGADTMSAGGGGPLGDNNQGADGVGNASGDWHCDSTWMGDRVVTKSTRTWVLPSYNNHQYREIKSGSVDGSNANAYFGYSTPWGYFDFNRFHSHWSPRDWQRLINNYWGFRPRSLRVKIFNIQVKEVTVQDSTTTIANNLTSTVQVFTDDDYQLPYVVGNGTEGCLPAFPPQVFTLPQYGYATLNRDNTENPTERSSFFCLEYFPSKMLRTGNNFEFTYNFEEVPFHSSFAPSQNLFKLANPLVDQYLYRFVSTNNTGGVQFNKNLAGRYANTYKNWFPGPMGRTQGWNLGSGVNRASVSAFATTNRMELEGASYQVPPQPNGMTNNLQGSNTYALENTMIFNSQPANPGTTATYLEGNMLITSESETQPVNRVAYNVGGQMATNNQSSTTAPATGTYNLQEIVPGSVWMERDVYLQGPIWAKIPETGAHFHPSPAMGGFGLKHPPPMMLIKNTPVPGNITSFSDVPVSSFITQYSTGQVTVEMEWELKKENSKRWNPEIQYTNNYNDPQFVDFAPDSTGEYRTTRPIGTRYLTRPL

SEQ ID NO: 115 - protein, 736 aa, Adeno-associated virus
MAADGYLPDWLEDNLSEGIREWWDLKPGAPKPKANQQKQDDGRGLVLPGYKYLGPFNGLDKGEPVNAADAAALEHDKAYDQQLKAGDNPYLRYNHADAEFQERLQEDTSFGGNLGRAVFQAKKRVLEPFGLVEEGAKTAPGKKRPVEQSPQEPDSSSGIGKTGQQPAKKRLNFGQTGDSESVPDPQPLGEPPATPAAVGPTTMASGGGAPMADNNEGADGVGNASGNWHCDSTWLGDRVITTSTRTWALPTYNNHLYKQISSASTGASNDNHYFGYSTPWGYFDFNRFHCHFSPRDWQRLINNNWGFRPKRLNFKLFNIQVKEVTTNDGVTTIANNLTSTVQVFSDSEYQLPYVLGSAHQGCLPPFPADVFMIPQYGYLTLNNGSQAVGRSSFYCLEYFPSQMLRTGNNFTFSYTFEDVPFHSSYAHSQSLDRLMNPLIDQYLYYLNRTQNQSGSAQNKDLLFSRGSPAGMSVQPKNWLPGPCYRQQRVSKTKTDNNNSNFTWTGASKYNLNGRESIINPGTAMASHKDDKDKFFPMSGVMIFGKESAGASNTALDNVMITDEEEIKATNPVATERFGTVAVNLQSSSTDPATGDVHVMGALPGMVWQDRDVYLQGPIWAKIPHTDGHFHPSPLMGGFGLKHPPPQILIKNTPVPANPPAEFSATKFASFITQYSTGQVSVEIEWELQKENSKRWNPEVQYTSNYAKSANVDFTVDNNGLYTEPRPIGTRYLTRPL

SEQ ID NO: 116 - protein, 737 aa, Adeno-associated virus
MAADGYLPDWLEDNLSEGIREWWDLKPGAPKPKANQQKQDNGRGLVLPGYKYLGPFNGLDKGEPVNAADAAALEHDKAYDQQLKAGDNPYLRYNHADAEFQERLQEDTSFGGNLGRAVFQAKKRVLEPLGLVEEGAKTAPAKKRPVEPSPQRSPDSSTGIGKKGQQPARKRLNFGQTGDSESVPDPQPLGEPPAAPSSVGSGTVAAGGGAPMADNNEGADGVGNASGNWHCDSTWLGDRVITTSTRTWALPTYNNHLYKQISSETAGSTNDNTYFGYSTPWGYFDFNRFHCHFSPRDWQRLINNNWGFRPKKLRFKLFNIQVKEVTTNDGVTTIANNLTSTIQVFSDSEYQLPYVLGSAHQGCLPPFPADVFMIPQYGYLTLNNGSQSVGRSSFYCLEYFPSQMLRTGNNFEFSYSFEDVPFHSSYAHSQSLDRLMNPLIDQYLYYLARTQSNPGGTAGNRELQFYQGGPSTMAEQAKNWLPGPCFRQQRVSKTLDQNNNSNFAWTGATKYHLNGRNSLVNPGVAMATHKDDEDRFFPSSGVLIFGKTGATNKTTLENVLMTNEEEIRPTNPVATEEYGIVSSNLQAANTAAQTQVVNNQGALPGMVWQNRDVYLQGPIWAKIPHTDGNFHPSPLMGGFGLKHPPPQILIKNTPVPANPPEVFTPAKFASFITQYSTGQVSVEIEWELQKENSKRWNPEIQYTSNFEKQTGVDFAVDSQGVYSEPRPIGTRYLTRNL

SEQ ID NO: 117 - protein, 738 aa, Adeno-associated virus
MAADGYLPDWLEDNLSEGIREWWALKPGAPKPKANQQKQDDGRGLVLPGYKYLGPFNGLDKGEPVNAADAAALEHDKAYDQQLQAGDNPYLRYNHADAEFQERLQEDTSFGGNLGRAVFQAKKRVLEPLGLVEEGAKTAPGKKRPVEPSPQRSPDSSTGIGKKGQQPARKRLNFGQTGDSESVPDPQPLGEPPAAPSGVGPNTMAAGGGAPMADNNEGADGVGSSSGNWHCDSTWLGDRVITTSTRTWALPTYNNHLYKQISNGTSGGATNDNTYFGYSTPWGYFDFNRFHCHFSPRDWQRLINNNWGFRPKRLSFKLFNIQVKEVTQNEGTKTIANNLTSTIQVFTDSEYQLPYVLGSAHQGCLPPFPADVFMIPQYGYLTLNNGSQAVGRSSFYCLEYFPSQMLRTGNNFQFTYTFEDVPFHSSYAHSQSLDRLMNPLIDQYLYYLSRTQTTGGTANTQTLGFSQGGPNTMANQAKNWLPGPCYRQQRVSTTTGQNNNSNFAWTAGTKYHLNGRNSLANPGIAMATHKDDEERFFPSNGILIFGKQNAARDNADYSDVMLTSEEEIKTTNPVATEEYGIVADNLQQQNTAPQIGTVNSQGALPGMVWQNRDVYLQGPIWAKIPHTDGNFHPSPLMGGFGLKHPPPQILIKNTPVPADPPTTFNQSKLNSFITQYSTGQVSVEIEWELQKENSKRWNPEIQYTSNYYKSTSVDFAVNTEGVYSEPRPIGTRYLTRNL

SEQ ID NO: 118 - protein, 736 aa, Adeno-associated virus
MAADGYLPDWLEDNLSEGIREWWALKPGAPQPKANQQHQDNARGLVLPGYKYLGPGNGLDKGEPVNAADAAALEHDKAYDQQLKAGDNPYLKYNHADAEFQERLKEDTSFGGNLGRAVFQAKKRLLEPLGLVEEAAKTAPGKKRPVEQSPQEPDSSAGIGKSGAQPAKKRLNFGQTGDTESVPDPQPIGEPPAAPSGVGSLTMASGGGAPVADNNEGADGVGSSSGNWHCDSQWLGDRVITTSTRTWALPTYNNHLYKQISNSTSGGSSNDNAYFGYSTPWGYFDFNRFHCHFSPRDWQRLINNNWGFRPKRLNFKLFNIQVKEVTDNNGVKTIANNLTSTVQVFTDSDYQLPYVLGSAHEGCLPPFPADVFMIPQYGYLTLNDGSQAVGRSSFYCLEYFPSQMLRTGNNFQFSYEFENVPFHSSYAHSQSLDRLMNPLIDQYLYYLSKTINGSGQNQQTLKFSVAGPSNMAVQGRNYIPGPSYRQQRVSTTVTQNNNSEFAWPGASSWALNGRNSLMNPGPAMASHKEGEDRFFPLSGSLIFGKQGTGRDNVDADKVMITNEEEIKTTNPVATESYGQVATNHQSAQAQAQTGWVQNQGILPGMVWQDRDVYLQGPIWAKIPHTDGNFHPSPLMGGFGMKHPPPQILIKNTPVPADPPTAFNKDKLNSFITQYSTGQVSVEIEWELQKENSKRWNPEIQYTSNYYKSNNVEFAVNTEGVYSEPRPIGTRYLTRNL

SEQ ID NO: 119 - protein, 736 aa, Adeno-associated virus
MAADGYLPDWLEDNLSEGIREWWALKPGAPQPKANQQHQDNARGLVLPGYKYLGPGNGLDKGEPVNAADAAALEHDKAYDQQLKAGDNPYLKYNHADAEFQERLKEDTSFGGNLGRAVFQAKKRLLEPLGLVEEAAKTAPGKKRPVEQSPQEPDSSAGIGKSGAQPAKKRLNFGQTGDTESVPDPQPIGEPPAAPSGVGSLTMASGGGAPVADNNEGADGVGSSSGNWHCDSQWLGDRVITTSTRTWALPTYNNHLYKQISNSTSGGSSNDNAYFGYSTPWGYFDFNRFHCHFSPRDWQRLINNNWGFRPKRLNFKLFNIQVKEVTDNNGVKTIANNLTSTVQVFTDSDYQLPYVLGSAHEGCLPPFPADVFMIPQYGYLTLNDGSQAVGRSSFYCLEYFPSQMLRTGNNFQFSYEFENVPFHSSYAHSQSLDRLMNPLIDQYLYYLSKTINGSGQNQQTLKFSVAGPSNMAVQGRNYIPGPSYRQQRVSTTVTQNNNSEFAWPGASSWALNGRNSLMNPGPAMASHKEGEDRFFPLSGSLIFGKQGTGRDNVDADKVMITNEEEIKTTNPVATESYGQVATNHQSDGAQAQTGWVQNQGILPGMVWQDRDVYLQGPIWAKIPHTDGNFHPSPLMGGFGMKHPPPQILIKNTPVPADPPTAFNKDKLNSFITQYSTGQVSVEIEWELQKENSKRWNPEIQYTSNYYKSNNVEFAVNTEGVYSEPRPIGTRYLTRNL

SEQ ID NO: 120 - protein, 738 aa, Adeno-associated virus
MAADGYLPDWLEDNLSEGIREWWDLKPGAPKPKANQQKQDDGRGLVLPGYKYLGPFNGLDKGEPVNAADAAALEHDKAYDQQLKAGDNPYLRYNHADAEFQERLQEDTSFGGNLGRAVFQAKKRVLEPLGLVEEGAKTAPGKKRPVEPSPQRSPDSSTGIGKKGQQPAKKRLNFGQTGDSESVPDPQPIGEPPAGPSGLGSGTMAAGGGAPMADNNEGADGVGSSSGNWHCDSTWLGDRVITTSTRTWALPTYNNHLYKQISNGTSGGSTNDNTYFGYSTPWGYFDFNRFHCHFSPRDWQRLINNNWGFRPKRLNFKLFNIQVKEVTQNEGTKTIANNLTSTIQVFTDSEYQLPYVLGSAHQGCLPPFPADVFMIPQYGYLTLNNGSQAVGRSSFYCLEYFPSQMLRTGNNFEFSYQFEDVPFHSSYAHSQSLDRLMNPLIDQYLYYLSRTQSTGGTAGTQQLLFSQAGPNNMSAQAKNWLPGPCYRQQRVSTTLSQNNNSNFAWTGATKYHLNGRDSLVNPGVAMATHKDDEERFFPSSGVLMFGKQGAGKDNVDYSSVMLTSEEEIKTTNPVATEQYGVVADNLQQQNAAPIVGAVNSQGALPGMVWQNRDVYLQGPIWAKIPHTDGNFHPSPLMGGFGLKHPPPQILIKNTPVPADPPTTFSQAKLASFITQYSTGQVSVEIEWELQKENSKRWNPEIQYTSNYYKSTNVDFAVNTDGTYSEPRPIGTRYLTRNL

SEQ ID NO: 121 - protein, 738 aa, Adeno-associated virus
MAADGYLPDWLEDNLSEGIREWWDLKPGAPKPKANQQKQDDGRGLVLPGYKYLGPFNGLDKGEPVNAADAAALEHDKAYDQQLKAGDNPYLRYNHADAEFQERLQEDTSFGGNLGRAVFQAKKRVLEPLGLVEEGAKTAPGKKRPVEPSPQRSPDSSTGIGKTGQQPAKKRLNFGQTGDSESVPDPQPIGEPPAGPSGLGSGTMAAGGGAPMADNNEGADGVGSSSGNWHCDSTWLGDRVITTSTRTWALPTYNNHLYKQISNGTSGGSTNDNTYFGYSTPWGYFDFNRFHCHFSPRDWQRLINNNWGFRPKRLNFKLFNIQVKEVTQNEGTKTIANNLTSTIQVFTDSEYQLPYVLGSAHQGCLPPFPADVFMIPQYGYLTLNNGSQAVGRSSFYCLEYFPSQMLRTGNNFEFSYQFEDVPFHSSYAHSQSLDRLMNPLIDQYLYYLSRTQSTGGTAGTQQLLFSQAGPNNMSAQAKNWLPGPCYRQQRVSTTLSQNNNSNFAWTGATKYHLNGRDSLVNPGVAMATHKDDEERFFPSSGVLMFGKQGAGKDNVDYSSVMLTSEEEIKTTNPVATEQYGVVADNLQQQNAAPIVGAVNSQGALPGMVWQNRDVYLQGPIWAKIPHTDGNFHPSPLMGGFGLKHPPPQILIKNTPVPADPPTTFSQAKLASFITQYSTGQVSVEIEWELQKENSKRWNPEIQYTSNYYKSTNVDFAVNTEGTYSEPRPIGTRYLTRNL

SEQ ID NO: 122 - protein, 738 aa, Adeno-associated virus hu.37
MAADGYLPDWLEDNLSEGIREWWDLKPGAPKPKANQQKQDDGRGLVLPGYKYLGPFNGLDKGEPVNAADAAALEHDKAYDQQLKAGDNPYLRYNHADAEFQERLQEDTSFGGNLGRAVFQAKKRVLEPLGLVEEAAKTAPGKKRPVEPSPQRSPDSSTGIGKKGQQPAKKRLNFGQTGDSESVPDPQPIGEPPAGPSGLGSGTMAAGGGAPMADNNEGADGVGSSSGNWHCDSTWLGDRVITTSTRTWALPTYNNHLYKQISNGTSGGSTNDNTYFGYSTPWGYFDFNRFHCHFSPRDWQRLINNNWGFRPKRLSFKLFNIQVKEVTQNEGTKTIANNLTSTIQVFTDSEYQLPYVLGSAHQGCLPPFPADVFMIPQYGYLTLNNGSQAVGRSSFYCLEYFPSQMLRTGNNFEFSYTFEDVPFHSSYAHSQSLDRLMNPLIDQYLYYLSRTQSTGGTQGTQQLLFSQAGPANMSAQAKNWLPGPCYRQQRVSTTLSQNNNSNFAWTGATKYHLNGRDSLVNPGVAMATHKDDEERFFPSSGVLMFGKQGAGRDNVDYSSVMLTSEEEIKTTNPVATEQYGVVADNLQQTNTGPIVGNVNSQGALPGMVWQNRDVYLQGPIWAKIPHTDGNFHPSPLMGGFGLKHPPPQILIKNTPVPADPPTTFSQAKLASFITQYSTGQVSVEIEWELQKENSKRWNPEIQYTSNYYKSTNVDFAVNTEGTYSEPRPIGTRYLTRNL

SEQ ID NO: 123 - protein, 738 aa, Adeno-associated virus rh.74 version 1
MAADGYLPDWLEDNLSEGIREWWDLKPGAPKPKANQQKQDNGRGLVLPGYKYLGPFNGLDKGEPVNAADAAALEHDKAYDQQLQAGDNPYLRYNHADAEFQERLQEDTSFGGNLGRAVFQAKKRVLEPLGLVESPVKTAPGKKRPVEPSPQRSPDSSTGIGKKGQQPAKKRLNFGQTGDSESVPDPQPIGEPPAGPSGLGSGTMAAGGGAPMADNNEGADGVGSSSGNWHCDSTWLGDRVITTSTRTWALPTYNNHLYKQISNGTSGGSTNDNTYFGYSTPWGYFDFNRFHCHFSPRDWQRLINNNWGFRPKRLNFKLFNIQVKEVTQNEGTKTIANNLTSTIQVFTDSEYQLPYVLGSAHQGCLPPFPADVFMIPQYGYLTLNNGSQAVGRSSFYCLEYFPSQMLRTGNNFEFSYNFEDVPFHSSYAHSQSLDRLMNPLIDQYLYYLSRTQSTGGTAGTQQLLFSQAGPNNMSAQAKNWLPGPCYRQQRVSTTLSQNNNSNFAWTGATKYHLNGRDSLVNPGVAMATHKDDEERFFPSSGVLMFGKQGAGKDNVDYSSVMLTSEEEIKTTNPVATEQYGVVADNLQQQNAAPIVGAVNSQGALPGMVWQNRDVYLQGPIWAKIPHTDGNFHPSPLMGGFGLKHPPPQILIKNTPVPADPPTTFTKAKLASFITQYSTGQVSVEIEWELQKENSKRWNPEIQYTSNYYKSTNVDFAVNTEGTYSEPRPIGTRYLTRNL

SEQ ID NO: 124 - protein, 738 aa, Adeno-associated virus rh.39
MAADGYLPDWLEDNLSEGIREWWALKPGAPKPKANQQKQDDGRGLVLPGYKYLGPFNGLDKGEPVNAADAAALEHDKAYDQQLKAGDNPYLRYNHADAEFQERLQEDTSFGGNLGRAVFQAKKRVLEPLGLVEEAAKTAPGKKRPVEPSPQRSPDSSTGIGKKGQQPAKKRLNFGQTGDSESVPDPQPIGEPPAGPSGLGSGTMAAGGGAPMADNNEGADGVGSSSGNWHCDSTWLGDRVITTSTRTWALPTYNNHLYKQISNGTSGGSTNDNTYFGYSTPWGYFDFNRFHCHFSPRDWQRLINNNWGFRPKRLSFKLFNIQVKEVTQNEGTKTIANNLTSTIQVFTDSEYQLPYVLGSAHQGCLPPFPADVFMIPQYGYLTLNNGSQAVGRSSFYCLEYFPSQMLRTGNNFEFSYTFEDVPFHSSYAHSQSLDRLMNPLIDQYLYYLSRTQSTGGTQGTQQLLFSQAGPANMSAQAKNWLPGPCYRQQRVSTTLSQNNNSNFAWTGATKYHLNGRDSLVNPGVAMATHKDDEERFFPSSGVLMFGKQGAGRDNVDYSSVMLTSEEEIKTTNPVATEQYGVVADNLQQTNTGPIVGNVNSQGALPGMVWQNRDVYLQGPIWAKIPHTDGNFHPSPLMGGFGLKHPPPQILIKNTPVPADPPTTFSQAKLASFITQYSTGQVSVEIEWELQKENSKRWNPEIQYTSNYYKSTNVDFAVNTEGTYSEPRPIGTRYLTRNL

SEQ ID NO: 125 - protein, 743 aa, Artificial Sequence
  /note="Description of Artificial Sequence: Synthetic" polypeptide
MAADGYLPDWLEDNLSEGIREWWALKPGAPQPKANQQHQDNARGLVLPGYKYLGPGNGLDKGEPVNAADAAALEHDKAYDQQLKAGDNPYLKYNHADAEFQERLKEDTSFGGNLGRAVFQAKKRLLEPLGLVEEAAKTAPGKKRPVEQSPQEPDSSAGIGKSGAQPAKKRLNFGQTGDTESVPDPQPIGEPPAAPSGVGSLTMASGGGAPVADNNEGADGVGSSSGNWHCDSQWLGDRVITTSTRTWALPTYNNHLYKQISNSTSGGSSNDNAYFGYSTPWGYFDFNRFHCHFSPRDWQRLINNNWGFRPKRLNFKLFNIQVKEVTDNNGVKTIANNLTSTVQVFTDSDYQLPYVLGSAHEGCLPPFPADVFMIPQYGYLTLNDGSQAVGRSSFYCLEYFPSQMLRTGNNFQFSYEFENVPFHSSYAHSQSLDRLMNPLIDQYLYYLSKTINGSGQNQQTLKFSVAGPSNMAVQGRNYIPGPSYRQQRVSTTVTQNNNSEFAWPGASSWALNGRNSLMNPGPAMASHKEGEDRFFPLSGSLIFGKQGTGRDNVDADKVMITNEEEIKTTNPVATESYGQVATNHQSAQTLAAPFKAQAQTGWVQNQGILPGMVWQDRDVYLQGPIWAKIPHTDGNFHPSPLMGGFGMKHPPPQILIKNTPVPADPPTAFNKDKLNSFITQYSTGQVSVEIEWELQKENSKRWNPEIQYTSNYYKSNNVEFAVNTEGVYSEPRPIGTRYLTRNL

SEQ ID NO: 126 - protein, 743 aa, Artificial Sequence
  /note="Description of Artificial Sequence: Synthetic" polypeptide
MAADGYLPDWLEDNLSEGIREWWALKPGAPQPKANQQHQDNARGLVLPGYKYLGPGNGLDKGEPVNAADAAALEHDKAYDQQLKAGDNPYLKYNHADAEFQERLKEDTSFGGNLGRAVFQAKKRLLEPLGLVEEAAKTAPGKKRPVEQSPQEPDSSAGIGKSGAQPAKKRLNFGQTGDTESVPDPQPIGEPPAAPSGVGSLTMASGGGAPVADNNEGADGVGSSSGNWHCDSQWLGDRVITTSTRTWALPTYNNHLYKQISNSTSGGSTLAAPFKSNDNAYFGYSTPWGYFDFNRFHCHFSPRDWQRLINNNWGFRPKRLNFKLFNIQVKEVTDNNGVKTIANNLTSTVQVFTDSDYQLPYVLGSAHEGCLPPFPADVFMIPQYGYLTLNDGSQAVGRSSFYCLEYFPSQMLRTGNNFQFSYEFENVPFHSSYAHSQSLDRLMNPLIDQYLYYLSKTINGSGQNQQTLKFSVAGPSNMAVQGRNYIPGPSYRQQRVSTTVTQNNNSEFAWPGASSWALNGRNSLMNPGPAMASHKEGEDRFFPLSGSLIFGKQGTGRDNVDADKVMITNEEEIKTTNPVATESYGQVATNHQSAQAQAQTGWVQNQGILPGMVWQDRDVYLQGPIWAKIPHTDGNFHPSPLMGGFGMKHPPPQILIKNTPVPADPPTAFNKDKLNSFITQYSTGQVSVEIEWELQKENSKRWNPEIQYTSNYYKSNNVEFAVNTEGVYSEPRPIGTRYLTRNL

SEQ ID NO: 127 - protein, 743 aa, Artificial Sequence
  /note="Description of Artificial Sequence: Synthetic" polypeptide
MAADGYLPDWLEDNLSEGIREWWALKPGAPQPKANQQHQDNARGLVLPGYKYLGPGNGLDKGEPVNAADAAALEHDKAYDQQLKAGDNPYLKYNHADAEFQERLKEDTSFGGNLGRAVFQAKKRLLEPLGLVEEAAKTAPGKKRPVEQSPQEPDSSAGIGKSGAQPAKKRLNFGQTGDTESVPDPQPIGEPPAAPSGVGSLTMASGGGAPVADNNEGADGVGSSSGNWHCDSQWLGDRVITTSTRTWALPTYNNHLYKQISNSTSGGSSNDNAYFGYSTPWGYFDFNRFHCHFSPRDWQRLINNNWGFRPKRLNFKLFNIQVKEVTDNNGVKTIANNLTSTVQVFTDSDYQLPYVLGSAHEGCLPPFPADVFMIPQYGYLTLNDGSQAVGRSSFYCLEYFPSQMLRTGNNFQFSYEFENVPFHSSYAHSQSLDRLMNPLIDQYLYYLSKTINGSTLAAPFKGQNQQTLKFSVAGPSNMAVQGRNYIPGPSYRQQRVSTTVTQNNNSEFAWPGASSWALNGRNSLMNPGPAMASHKEGEDRFFPLSGSLIFGKQGTGRDNVDADKVMITNEEEIKTTNPVATESYGQVATNHQSAQAQAQTGWVQNQGILPGMVWQDRDVYLQGPIWAKIPHTDGNFHPSPLMGGFGMKHPPPQILIKNTPVPADPPTAFNKDKLNSFITQYSTGQVSVEIEWELQKENSKRWNPEIQYTSNYYKSNNVEFAVNTEGVYSEPRPIGTRYLTRNL

SEQ ID NO: 128 - protein, 743 aa, Artificial Sequence
  /note="Description of Artificial Sequence: Synthetic" polypeptide
MAADGYLPDWLEDNLSEGIREWWALKPGAPQPKANQQHQDNARGLVLPGYKYLGPGNGLDKGEPVNAADAAALEHDKAYDQQLKAGDNPYLKYNHADAEFQERLKEDTSFGGNLGRAVFQAKKRLLEPLGLVEEAAKTAPGKKRPVEQSPQEPDSSAGIGKSGAQPAKKRLNFGQTGDTESVPDPQPIGEPPAAPSGVGSLTMASGGGAPVADNNEGADGVGSSSGNWHCDSQWLGDRVITTSTRTWALPTYNNHLYKQISNSTSGGSSNDNAYFGYSTPWGYFDFNRFHCHFSPRDWQRLINNNWGFRPKRLNFKLFNIQVKEVTDNNGVKTIANNLTSTVQVFTDSDYQLPYVLGSAHEGCLPPFPADVFMIPQYGYLTLNDGSQAVGRSSFYCLEYFPSQMLRTGNNFQFSYEFENVPFHSSYAHSQSLDRLMNPLIDQYLYYLSKTINGSGQNQQTLKFSVAGPSNMAVQGRNYIPGPSYRQQRVSTTVTQNNNSEFAWPGASSWALNGRNSLMNPGPAMASHKEGEDRFFPLSGSLIFGKQGTGRDNVDADKVMITNEEEIKTTNPVATESYGQVATNHQSAQKMQVPFQAQAQTGWVQNQGILPGMVWQDRDVYLQGPIWAKIPHTDGNFHPSPLMGGFGMKHPPPQILIKNTPVPADPPTAFNKDKLNSFITQYSTGQVSVEIEWELQKENSKRWNPEIQYTSNYYKSNNVEFAVNTEGVYSEPRPIGTRYLTRNL

SEQ ID NO: 129 - protein, 743 aa, Artificial Sequence
  /note="Description of Artificial Sequence: Synthetic" polypeptide
MAADGYLPDWLEDNLSEGIREWWALKPGAPQPKANQQHQDNARGLVLPGYKYLGPGNGLDKGEPVNAADAAALEHDKAYDQQLKAGDNPYLKYNHADAEFQERLKEDTSFGGNLGRAVFQAKKRLLEPLGLVEEAAKTAPGKKRPVEQSPQEPDSSAGIGKSGAQPAKKRLNFGQTGDTESVPDPQPIGEPPAAPSGVGSLTMASGGGAPVADNNEGADGVGSSSGNWHCDSQWLGDRVITTSTRTWALPTYNNHLYKQISNSTSGGSKMQVPFQSNDNAYFGYSTPWGYFDFNRFHCHFSPRDWQRLINNNWGFRPKRLNFKLFNIQVKEVTDNNGVKTIANNLTSTVQVFTDSDYQLPYVLGSAHEGCLPPFPADVFMIPQYGYLTLNDGSQAVGRSSFYCLEYFPSQMLRTGNNFQFSYEFENVPFHSSYAHSQSLDRLMNPLIDQYLYYLSKTINGSGQNQQTLKFSVAGPSNMAVQGRNYIPGPSYRQQRVSTTVTQNNNSEFAWPGASSWALNGRNSLMNPGPAMASHKEGEDRFFPLSGSLIFGKQGTGRDNVDADKVMITNEEEIKTTNPVATESYGQVATNHQSAQAQAQTGWVQNQGILPGMVWQDRDVYLQGPIWAKIPHTDGNFHPSPLMGGFGMKHPPPQILIKNTPVPADPPTAFNKDKLNSFITQYSTGQVSVEIEWELQKENSKRWNPEIQYTSNYYKSNNVEFAVNTEGVYSEPRPIGTRYLTRNL

SEQ ID NO: 130 - protein, 743 aa, Artificial Sequence
  /note="Description of Artificial Sequence: Synthetic" polypeptide
MAADGYLPDWLEDNLSEGIREWWALKPGAPQPKANQQHQDNARGLVLPGYKYLGPGNGLDKGEPVNAADAAALEHDKAYDQQLKAGDNPYLKYNHADAEFQERLKEDTSFGGNLGRAVFQAKKRLLEPLGLVEEAAKTAPGKKRPVEQSPQEPDSSAGIGKSGAQPAKKRLNFGQTGDTESVPDPQPIGEPPAAPSGVGSLTMASGGGAPVADNNEGADGVGSSSGNWHCDSQWLGDRVITTSTRTWALPTYNNHLYKQISNSTSGGSSNDNAYFGYSTPWGYFDFNRFHCHFSPRDWQRLINNNWGFRPKRLNFKLFNIQVKEVTDNNGVKTIANNLTSTVQVFTDSDYQLPYVLGSAHEGCLPPFPADVFMIPQYGYLTLNDGSQAVGRSSFYCLEYFPSQMLRTGNNFQFSYEFENVPFHSSYAHSQSLDRLMNPLIDQYLYYLSKTINGSKMQVPFQGQNQQTLKFSVAGPSNMAVQGRNYIPGPSYRQQRVSTTVTQNNNSEFAWPGASSWALNGRNSLMNPGPAMASHKEGEDRFFPLSGSLIFGKQGTGRDNVDADKVMITNEEEIKTTNPVATESYGQVATNHQSAQAQAQTGWVQNQGILPGMVWQDRDVYLQGPIWAKIPHTDGNFHPSPLMGGFGMKHPPPQILIKNTPVPADPPTAFNKDKLNSFITQYSTGQVSVEIEWELQKENSKRWNPEIQYTSNYYKSNNVEFAVNTEGVYSEPRPIGTRYLTRNL

SEQ ID NO: 131 - protein, 743 aa, Artificial Sequence
  /note="Description of Artificial Sequence: Synthetic" polypeptide
MAADGYLPDWLEDNLSEGIREWWALKPGAPQPKANQQHQDNARGLVLPGYKYLGPGNGLDKGEPVNAADAAALEHDKAYDQQLKAGDNPYLKYNHADAEFQERLKEDTSFGGNLGRAVFQAKKRLLEPLGLVEEAAKTAPGKKRPVEQSPQEPDSSAGIGKSGAQPAKKRLNFGQTGDTESVPDPQPIGEPPAAPSGVGSLTMASGGGAPVADNNEGADGVGSSSGNWHCDSQWLGDRVITTSTRTWALPTYNNHLYKQISNSTSGGSSNDNAYFGYSTPWGYFDFNRFHCHFSPRDWQRLINNNWGFRPKRLNFKLFNIQVKEVTDNNGVKTIANNLTSTVQVFTDSDYQLPYVLGSAHEGCLPPFPADVFMIPQYGYLTLNDGSQAVGRSSFYCLEYFPSQMLRTGNNFQFSYEFENVPFHSSYAHSQSLDRLMNPLIDQYLYYLSKTINGSGQNQQTLKFSVAGPSNMAVQGRNYIPGPSYRQQRVSTTVTQNNNSEFAWPGASSWALNGRNSLMNPGPAMASHKEGEDRFFPLSGSLIFGKQGTGRDNVDADKVMITNEEEIKTTNPVATESYGQVATNHQSAQQQAAPSFAQAQTGWVQNQGILPGMVWQDRDVYLQGPIWAKIPHTDGNFHPSPLMGGFGMKHPPPQILIKNTPVPADPPTAFNKDKLNSFITQYSTGQVSVEIEWELQKENSKRWNPEIQYTSNYYKSNNVEFAVNTEGVYSEPRPIGTRYLTRNL

SEQ ID NO: 132 - protein, 743 aa, Artificial Sequence
  /note="Description of Artificial Sequence: Synthetic" polypeptide
MAADGYLPDWLEDNLSEGIREWWALKPGAPQPKANQQHQDNARGLVLPGYKYLGPGNGLDKGEPVNAADAAALEHDKAYDQQLKAGDNPYLKYNHADAEFQERLKEDTSFGGNLGRAVFQAKKRLLEPLGLVEEAAKTAPGKKRPVEQSPQEPDSSAGIGKSGAQPAKKRLNFGQTGDTESVPDPQPIGEPPAAPSGVGSLTMASGGGAPVADNNEGADGVGSSSGNWHCDSQWLGDRVITTSTRTWALPTYNNHLYKQISNSTSGGSQQAAPSFSNDNAYFGYSTPWGYFDFNRFHCHFSPRDWQRLINNNWGFRPKRLNFKLFNIQVKEVTDNNGVKTIANNLTSTVQVFTDSDYQLPYVLGSAHEGCLPPFPADVFMIPQYGYLTLNDGSQAVGRSSFYCLEYFPSQMLRTGNNFQFSYEFENVPFHSSYAHSQSLDRLMNPLIDQYLYYLSKTINGSGQNQQTLKFSVAGPSNMAVQGRNYIPGPSYRQQRVSTTVTQNNNSEFAWPGASSWALNGRNSLMNPGPAMASHKEGEDRFFPLSGSLIFGKQGTGRDNVDADKVMITNEEEIKTTNPVATESYGQVATNHQSAQAQAQTGWVQNQGILPGMVWQDRDVYLQGPIWAKIPHTDGNFHPSPLMGGFGMKHPPPQILIKNTPVPADPPTAFNKDKLNSFITQYSTGQVSVEIEWELQKENSKRWNPEIQYTSNYYKSNNVEFAVNTEGVYSEPRPIGTRYLTRNL

SEQ ID NO: 133 - protein, 743 aa, Artificial Sequence
  /note="Description of Artificial Sequence: Synthetic" polypeptide
MAADGYLPDWLEDNLSEGIREWWALKPGAPQPKANQQHQDNARGLVLPGYKYLGPGNGLDKGEPVNAADAAALEHDKAYDQQLKAGDNPYLKYNHADAEFQERLKEDTSFGGNLGRAVFQAKKRLLEPLGLVEEAAKTAPGKKRPVEQSPQEPDSSAGIGKSGAQPAKKRLNFGQTGDTESVPDPQPIGEPPAAPSGVGSLTMASGGGAPVADNNEGADGVGSSSGNWHCDSQWLGDRVITTSTRTWALPTYNNHLYKQISNSTSGGSSNDNAYFGYSTPWGYFDFNRFHCHFSPRDWQRLINNNWGFRPKRLNFKLFNIQVKEVTDNNGVKTIANNLTSTVQVFTDSDYQLPYVLGSAHEGCLPPFPADVFMIPQYGYLTLNDGSQAVGRSSFYCLEYFPSQMLRTGNNFQFSYEFENVPFHSSYAHSQSLDRLMNPLIDQYLYYLSKTINGSQQAAPSFGQNQQTLKFSVAGPSNMAVQGRNYIPGPSYRQQRVSTTVTQNNNSEFAWPGASSWALNGRNSLMNPGPAMASHKEGEDRFFPLSGSLIFGKQGTGRDNVDADKVMITNEEEIKTTNPVATESYGQVATNHQSAQAQAQTGWVQNQGILPGMVWQDRDVYLQGPIWAKIPHTDGNFHPSPLMGGFGMKHPPPQILIKNTPVPADPPTAFNKDKLNSFITQYSTGQVSVEIEWELQKENSKRWNPEIQYTSNYYKSNNVEFAVNTEGVYSEPRPIGTRYLTRNL

SEQ ID NO: 134 - protein, 743 aa, Artificial Sequence
  /note="Description of Artificial Sequence: Synthetic" polypeptide
MAADGYLPDWLEDNLSEGIREWWALKPGAPQPKANQQHQDNARGLVLPGYKYLGPGNGLDKGEPVNAADAAALEHDKAYDQQLKAGDNPYLKYNHADAEFQERLKEDTSFGGNLGRAVFQAKKRLLEPLGLVEEAAKTAPGKKRPVEQSPQEPDSSAGIGKSGAQPAKKRLNFGQTGDTESVPDPQPIGEPPAAPSGVGSLTMASGGGAPVADNNEGADGVGSSSGNWHCDSQWLGDRVITTSTRTWALPTYNNHLYKQISNSTSGGSSNDNAYFGYSTPWGYFDFNRFHCHFSPRDWQRLINNNWGFRPKRLNFKLFNIQVKEVTDNNGVKTIANNLTSTVQVFTDSDYQLPYVLGSAHEGCLPPFPADVFMIPQYGYLTLNDGSQAVGRSSFYCLEYFPSQMLRTGNNFQFSYEFENVPFHSSYAHSQSLDRLMNPLIDQYLYYLSKTINGSGQNQQTLKFSVAGPSNMAVQGRNYIPGPSYRQQRVSTTVTQNNNSEFAWPGASSWALNGRNSLMNPGPAMASHKEGEDRFFPLSGSLIFGKQGTGRDNVDADKVMITNEEEIKTTNPVATESYGQVATNHQSAQRYNAPFKAQAQTGWVQNQGILPGMVWQDRDVYLQGPIWAKIPHTDGNFHPSPLMGGFGMKHPPPQILIKNTPVPADPPTAFNKDKLNSFITQYSTGQVSVEIEWELQKENSKRWNPEIQYTSNYYKSNNVEFAVNTEGVYSEPRPIGTRYLTRNL

SEQ ID NO: 135 - protein, 743 aa, Artificial Sequence
  /note="Description of Artificial Sequence: Synthetic" polypeptide
MAADGYLPDWLEDNLSEGIREWWALKPGAPQPKANQQHQDNARGLVLPGYKYLGPGNGLDKGEPVNAADAAALEHDKAYDQQLKAGDNPYLKYNHADAEFQERLKEDTSFGGNLGRAVFQAKKRLLEPLGLVEEAAKTAPGKKRPVEQSPQEPDSSAGIGKSGAQPAKKRLNFGQTGDTESVPDPQPIGEPPAAPSGVGSLTMASGGGAPVADNNEGADGVGSSSGNWHCDSQWLGDRVITTSTRTWALPTYNNHLYKQISNSTSGGSRYNAPFKSNDNAYFGYSTPWGYFDFNRFHCHFSPRDWQRLINNNWGFRPKRLNFKLFNIQVKEVTDNNGVKTIANNLTSTVQVFTDSDYQLPYVLGSAHEGCLPPFPADVFMIPQYGYLTLNDGSQAVGRSSFYCLEYFPSQMLRTGNNFQFSYEFENVPFHSSYAHSQSLDRLMNPLIDQYLYYLSKTINGSGQNQQTLKFSVAGPSNMAVQGRNYIPGPSYRQQRVSTTVTQNNNSEFAWPGASSWALNGRNSLMNPGPAMASHKEGEDRFFPLSGSLIFGKQGTGRDNVDADKVMITNEEEIKTTNPVATESYGQVATNHQSAQAQAQTGWVQNQGILPGMVWQDRDVYLQGPIWAKIPHTDGNFHPSPLMGGFGMKHPPPQILIKNTPVPADPPTAFNKDKLNSFITQYSTGQVSVEIEWELQKENSKRWNPEIQYTSNYYKSNNVEFAVNTEGVYSEPRPIGTRYLTRNL

SEQ ID NO: 136 - protein, 743 aa, Artificial Sequence
  /note="Description of Artificial Sequence: Synthetic" polypeptide
MAADGYLPDWLEDNLSEGIREWWALKPGAPQPKANQQHQDNARGLVLPGYKYLGPGNGLDKGEPVNAADAAALEHDKAYDQQLKAGDNPYLKYNHADAEFQERLKEDTSFGGNLGRAVFQAKKRLLEPLGLVEEAAKTAPGKKRPVEQSPQEPDSSAGIGKSGAQPAKKRLNFGQTGDTESVPDPQPIGEPPAAPSGVGSLTMASGGGAPVADNNEGADGVGSSSGNWHCDSQWLGDRVITTSTRTWALPTYNNHLYKQISNSTSGGSSNDNAYFGYSTPWGYFDFNRFHCHFSPRDWQRLINNNWGFRPKRLNFKLFNIQVKEVTDNNGVKTIANNLTSTVQVFTDSDYQLPYVLGSAHEGCLPPFPADVFMIPQYGYLTLNDGSQAVGRSSFYCLEYFPSQMLRTGNNFQFSYEFENVPFHSSYAHSQSLDRLMNPLIDQYLYYLSKTINGSRYNAPFKGQNQQTLKFSVAGPSNMAVQGRNYIPGPSYRQQRVSTTVTQNNNSEFAWPGASSWALNGRNSLMNPGPAMASHKEGEDRFFPLSGSLIFGKQGTGRDNVDADKVMITNEEEIKTTNPVATESYGQVATNHQSAQAQAQTGWVQNQGILPGMVWQDRDVYLQGPIWAKIPHTDGNFHPSPLMGGFGMKHPPPQILIKNTPVPADPPTAFNKDKLNSFITQYSTGQVSVEIEWELQKENSKRWNPEIQYTSNYYKSNNVEFAVNTEGVYSEPRPIGTRYLTRNL

SEQ ID NO: 137 - protein, 743 aa, Artificial Sequence
  /note="Description of Artificial Sequence: Synthetic" polypeptide
MAADGYLPDWLEDNLSEGIREWWALKPGAPQPKANQQHQDNARGLVLPGYKYLGPGNGLDKGEPVNAADAAALEHDKAYDQQLKAGDNPYLKYNHADAEFQERLKEDTSFGGNLGRAVFQAKKRLLEPLGLVEEAAKTAPGKKRPVEQSPQEPDSSAGIGKSGAQPAKKRLNFGQTGDTESVPDPQPIGEPPAAPSGVGSLTMASGGGAPVADNNEGADGVGSSSGNWHCDSQWLGDRVITTSTRTWALPTYNNHLYKQISNSTSGGSSNDNAYFGYSTPWGYFDFNRFHCHFSPRDWQRLINNNWGFRPKRLNFKLFNIQVKEVTDNNGVKTIANNLTSTVQVFTDSDYQLPYVLGSAHEGCLPPFPADVFMIPQYGYLTLNDGSQAVGRSSFYCLEYFPSQMLRTGNNFQFSYEFENVPFHSSYAHSQSLDRLMNPLIDQYLYYLSKTINGSGQNQQTLKFSVAGPSNMAVQGRNYIPGPSYRQQRVSTTVTQNNNSEFAWPGASSWALNGRNSLMNPGPAMASHKEGEDRFFPLSGSLIFGKQGTGRDNVDADKVMITNEEEIKTTNPVATESYGQVATNHQSAQLKLPPIVAQAQTGWVQNQGILPGMVWQDRDVYLQGPIWAKIPHTDGNFHPSPLMGGFGMKHPPPQILIKNTPVPADPPTAFNKDKLNSFITQYSTGQVSVEIEWELQKENSKRWNPEIQYTSNYYKSNNVEFAVNTEGVYSEPRPIGTRYLTRNL

SEQ ID NO: 138 - protein, 743 aa, Artificial Sequence
  /note="Description of Artificial Sequence: Synthetic" polypeptide
MAADGYLPDWLEDNLSEGIREWWALKPGAPQPKANQQHQDNARGLVLPGYKYLGPGNGLDKGEPVNAADAAALEHDKAYDQQLKAGDNPYLKYNHADAEFQERLKEDTSFGGNLGRAVFQAKKRLLEPLGLVEEAAKTAPGKKRPVEQSPQEPDSSAGIGKSGAQPAKKRLNFGQTGDTESVPDPQPIGEPPAAPSGVGSLTMASGGGAPVADNNEGADGVGSSSGNWHCDSQWLGDRVITTSTRTWALPTYNNHLYKQISNSTSGGSLKLPPIVSNDNAYFGYSTPWGYFDFNRFHCHFSPRDWQRLINNNWGFRPKRLNFKLFNIQVKEVTDNNGVKTIANNLTSTVQVFTDSDYQLPYVLGSAHEGCLPPFPADVFMIPQYGYLTLNDGSQAVGRSSFYCLEYFPSQMLRTGNNFQFSYEFENVPFHSSYAHSQSLDRLMNPLIDQYLYYLSKTINGSGQNQQTLKFSVAGPSNMAVQGRNYIPGPSYRQQRVSTTVTQNNNSEFAWPGASSWALNGRNSLMNPGPAMASHKEGEDRFFPLSGSLIFGKQGTGRDNVDADKVMITNEEEIKTTNPVATESYGQVATNHQSAQAQAQTGWVQNQGILPGMVWQDRDVYLQGPIWAKIPHTDGNFHPSPLMGGFGMKHPPPQILIKNTPVPADPPTAFNKDKLNSFITQYSTGQVSVEIEWELQKENSKRWNPEIQYTSNYYKSNNVEFAVNTEGVYSEPRPIGTRYLTRNL

SEQ ID NO: 139 - protein, 743 aa, Artificial Sequence
  /note="Description of Artificial Sequence: Synthetic" polypeptide
MAADGYLPDWLEDNLSEGIREWWALKPGAPQPKANQQHQDNARGLVLPGYKYLGPGNGLDKGEPVNAADAAALEHDKAYDQQLKAGDNPYLKYNHADAEFQERLKEDTSFGGNLGRAVFQAKKRLLEPLGLVEEAAKTAPGKKRPVEQSPQEPDSSAGIGKSGAQPAKKRLNFGQTGDTESVPDPQPIGEPPAAPSGVGSLTMASGGGAPVADNNEGADGVGSSSGNWHCDSQWLGDRVITTSTRTWALPTYNNHLYKQISNSTSGGSSNDNAYFGYSTPWGYFDFNRFHCHFSPRDWQRLINNNWGFRPKRLNFKLFNIQVKEVTDNNGVKTIANNLTSTVQVFTDSDYQLPYVLGSAHEGCLPPFPADVFMIPQYGYLTLNDGSQAVGRSSFYCLEYFPSQMLRTGNNFQFSYEFENVPFHSSYAHSQSLDRLMNPLIDQYLYYLSKTINGSLKLPPIVGQNQQTLKFSVAGPSNMAVQGRNYIPGPSYRQQRVSTTVTQNNNSEFAWPGASSWALNGRNSLMNPGPAMASHKEGEDRFFPLSGSLIFGKQGTGRDNVDADKVMITNEEEIKTTNPVATESYGQVATNHQSAQAQAQTGWVQNQGILPGMVWQDRDVYLQGPIWAKIPHTDGNFHPSPLMGGFGMKHPPPQILIKNTPVPADPPTAFNKDKLNSFITQYSTGQVSVEIEWELQKENSKRWNPEIQYTSNYYKSNNVEFAVNTEGVYSEPRPIGTRYLTRNL

SEQ ID NO: 140 - protein, 743 aa, Artificial Sequence
  /note="Description of Artificial Sequence: Synthetic" polypeptide
MAADGYLPDWLEDNLSEGIREWWALKPGAPQPKANQQHQDNARGLVLPGYKYLGPGNGLDKGEPVNAADAAALEHDKAYDQQLKAGDNPYLKYNHADAEFQERLKEDTSFGGNLGRAVFQAKKRLLEPLGLVEEAAKTAPGKKRPVEQSPQEPDSSAGIGKSGAQPAKKRLNFGQTGDTESVPDPQPIGEPPAAPSGVGSLTMASGGGAPVADNNEGADGVGSSSGNWHCDSQWLGDRVITTSTRTWALPTYNNHLYKQISNSTSGGSSNDNAYFGYSTPWGYFDFNRFHCHFSPRDWQRLINNNWGFRPKRLNFKLFNIQVKEVTDNNGVKTIANNLTSTVQVFTDSDYQLPYVLGSAHEGCLPPFPADVFMIPQYGYLTLNDGSQAVGRSSFYCLEYFPSQMLRTGNNFQFSYEFENVPFHSSYAHSQSLDRLMNPLIDQYLYYLSKTINGSGQNQQTLKFSVAGPSNMAVQGRNYIPGPSYRQQRVSTTVTQNNNSEFAWPGASSWALNGRNSLMNPGPAMASHKEGEDRFFPLSGSLIFGKQGTGRDNVDADKVMITNEEEIKTTNPVATESYGQVATNHQSAQPFIKPFEAQAQTGWVQNQGILPGMVWQDRDVYLQGPIWAKIPHTDGNFHPSPLMGGFGMKHPPPQILIKNTPVPADPPTAFNKDKLNSFITQYSTGQVSVEIEWELQKENSKRWNPEIQYTSNYYKSNNVEFAVNTEGVYSEPRPIGTRYLTRNL

SEQ ID NO: 141 - protein, 743 aa, Artificial Sequence
  /note="Description of Artificial Sequence: Synthetic" polypeptide
MAADGYLPDWLEDNLSEGIREWWALKPGAPQPKANQQHQDNARGLVLPGYKYLGPGNGLDKGEPVNAADAAALEHDKAYDQQLKAGDNPYLKYNHADAEFQERLKEDTSFGGNLGRAVFQAKKRLLEPLGLVEEAAKTAPGKKRPVEQSPQEPDSSAGIGKSGAQPAKKRLNFGQTGDTESVPDPQPIGEPPAAPSGVGSLTMASGGGAPVADNNEGADGVGSSSGNWHCDSQWLGDRVITTSTRTWALPTYNNHLYKQISNSTSGGSPFIKPFESNDNAYFGYSTPWGYFDFNRFHCHFSPRDWQRLINNNWGFRPKRLNFKLFNIQVKEVTDNNGVKTIANNLTSTVQVFTDSDYQLPYVLGSAHEGCLPPFPADVFMIPQYGYLTLNDGSQAVGRSSFYCLEYFPSQMLRTGNNFQFSYEFENVPFHSSYAHSQSLDRLMNPLIDQYLYYLSKTINGSGQNQQTLKFSVAGPSNMAVQGRNYIPGPSYRQQRVSTTVTQNNNSEFAWPGASSWALNGRNSLMNPGPAMASHKEGEDRFFPLSGSLIFGKQGTGRDNVDADKVMITNEEEIKTTNPVATESYGQVATNHQSAQAQAQTGWVQNQGILPGMVWQDRDVYLQGPIWAKIPHTDGNFHPSPLMGGFGMKHPPPQILIKNTPVPADPPTAFNKDKLNSFITQYSTGQVSVEIEWELQKENSKRWNPEIQYTSNYYKSNNVEFAVNTEGVYSEPRPIGTRYLTRNL

SEQ ID NO: 142 - protein, 743 aa, Artificial Sequence
  /note="Description of Artificial Sequence: Synthetic" polypeptide
MAADGYLPDWLEDNLSEGIREWWALKPGAPQPKANQQHQDNARGLVLPGYKYLGPGNGLDKGEPVNAADAAALEHDKAYDQQLKAGDNPYLKYNHADAEFQERLKEDTSFGGNLGRAVFQAKKRLLEPLGLVEEAAKTAPGKKRPVEQSPQEPDSSAGIGKSGAQPAKKRLNFGQTGDTESVPDPQPIGEPPAAPSGVGSLTMASGGGAPVADNNEGADGVGSSSGNWHCDSQWLGDRVITTSTRTWALPTYNNHLYKQISNSTSGGSSNDNAYFGYSTPWGYFDFNRFHCHFSPRDWQRLINNNWGFRPKRLNFKLFNIQVKEVTDNNGVKTIANNLTSTVQVFTDSDYQLPYVLGSAHEGCLPPFPADVFMIPQYGYLTLNDGSQAVGRSSFYCLEYFPSQMLRTGNNFQFSYEFENVPFHSSYAHSQSLDRLMNPLIDQYLYYLSKTINGSPFIKPFEGQNQQTLKFSVAGPSNMAVQGRNYIPGPSYRQQRVSTTVTQNNNSEFAWPGASSWALNGRNSLMNPGPAMASHKEGEDRFFPLSGSLIFGKQGTGRDNVDADKVMITNEEEIKTTNPVATESYGQVATNHQSAQAQAQTGWVQNQGILPGMVWQDRDVYLQGPIWAKIPHTDGNFHPSPLMGGFGMKHPPPQILIKNTPVPADPPTAFNKDKLNSFITQYSTGQVSVEIEWELQKENSKRWNPEIQYTSNYYKSNNVEFAVNTEGVYSEPRPIGTRYLTRNL

SEQ ID NO: 143 - protein, 743 aa, Artificial Sequence
  /note="Description of Artificial Sequence: Synthetic" polypeptide
MAADGYLPDWLEDNLSEGIREWWALKPGAPQPKANQQHQDNARGLVLPGYKYLGPGNGLDKGEPVNAADAAALEHDKAYDQQLKAGDNPYLKYNHADAEFQERLKEDTSFGGNLGRAVFQAKKRLLEPLGLVEEAAKTAPGKKRPVEQSPQEPDSSAGIGKSGAQPAKKRLNFGQTGDTESVPDPQPIGEPPAAPSGVGSLTMASGGGAPVADNNEGADGVGSSSGNWHCDSQWLGDRVITTSTRTWALPTYNNHLYKQISNSTSGGSSNDNAYFGYSTPWGYFDFNRFHCHFSPRDWQRLINNNWGFRPKRLNFKLFNIQVKEVTDNNGVKTIANNLTSTVQVFTDSDYQLPYVLGSAHEGCLPPFPADVFMIPQYGYLTLNDGSQAVGRSSFYCLEYFPSQMLRTGNNFQFSYEFENVPFHSSYAHSQSLDRLMNPLIDQYLYYLSKTINGSGQNQQTLKFSVAGPSNMAVQGRNYIPGPSYRQQRVSTTVTQNNNSEFAWPGASSWALNGRNSLMNPGPAMASHKEGEDRFFPLSGSLIFGKQGTGRDNVDADKVMITNEEEIKTTNPVATESYGQVATNHQSAQTLSLPWKAQAQTGWVQNQGILPGMVWQDRDVYLQGPIWAKIPHTDGNFHPSPLMGGFGMKHPPPQILIKNTPVPADPPTAFNKDKLNSFITQYSTGQVSVEIEWELQKENSKRWNPEIQYTSNYYKSNNVEFAVNTEGVYSEPRPIGTRYLTRNL

SEQ ID NO: 144 - protein, 743 aa, Artificial Sequence
  /note="Description of Artificial Sequence: Synthetic" polypeptide
MAADGYLPDWLEDNLSEGIREWWALKPGAPQPKANQQHQDNARGLVLPGYKYLGPGNGLDKGEPVNAADAAALEHDKAYDQQLKAGDNPYLKYNHADAEFQERLKEDTSFGGNLGRAVFQAKKRLLEPLGLVEEAAKTAPGKKRPVEQSPQEPDSSAGIGKSGAQPAKKRLNFGQTGDTESVPDPQPIGEPPAAPSGVGSLTMASGGGAPVADNNEGADGVGSSSGNWHCDSQWLGDRVITTSTRTWALPTYNNHLYKQISNSTSGGSTLSLPWKSNDNAYFGYSTPWGYFDFNRFHCHFSPRDWQRLINNNWGFRPKRLNFKLFNIQVKEVTDNNGVKTIANNLTSTVQVFTDSDYQLPYVLGSAHEGCLPPFPADVFMIPQYGYLTLNDGSQAVGRSSFYCLEYFPSQMLRTGNNFQFSYEFENVPFHSSYAHSQSLDRLMNPLIDQYLYYLSKTINGSGQNQQTLKFSVAGPSNMAVQGRNYIPGPSYRQQRVSTTVTQNNNSEFAWPGASSWALNGRNSLMNPGPAMASHKEGEDRFFPLSGSLIFGKQGTGRDNVDADKVMITNEEEIKTTNPVATESYGQVATNHQSAQAQAQTGWVQNQGILPGMVWQDRDVYLQGPIWAKIPHTDGNFHPSPLMGGFGMKHPPPQILIKNTPVPADPPTAFNKDKLNSFITQYSTGQVSVEIEWELQKENSKRWNPEIQYTSNYYKSNNVEFAVNTEGVYSEPRPIGTRYLTRNL

SEQ ID NO: 145 - protein, 743 aa, Artificial Sequence
  /note="Description of Artificial Sequence: Synthetic" polypeptide
MAADGYLPDWLEDNLSEGIREWWALKPGAPQPKANQQHQDNARGLVLPGYKYLGPGNGLDKGEPVNAADAAALEHDKAYDQQLKAGDNPYLKYNHADAEFQERLKEDTSFGGNLGRAVFQAKKRLLEPLGLVEEAAKTAPGKKRPVEQSPQEPDSSAGIGKSGAQPAKKRLNFGQTGDTESVPDPQPIGEPPAAPSGVGSLTMASGGGAPVADNNEGADGVGSSSGNWHCDSQWLGDRVITTSTRTWALPTYNNHLYKQISNSTSGGSSNDNAYFGYSTPWGYFDFNRFHCHFSPRDWQRLINNNWGFRPKRLNFKLFNIQVKEVTDNNGVKTIANNLTSTVQVFTDSDYQLPYVLGSAHEGCLPPFPADVFMIPQYGYLTLNDGSQAVGRSSFYCLEYFPSQMLRTGNNFQFSYEFENVPFHSSYAHSQSLDRLMNPLIDQYLYYLSKTINGSTLSLPWKGQNQQTLKFSVAGPSNMAVQGRNYIPGPSYRQQRVSTTVTQNNNSEFAWPGASSWALNGRNSLMNPGPAMASHKEGEDRFFPLSGSLIFGKQGTGRDNVDADKVMITNEEEIKTTNPVATESYGQVATNHQSAQAQAQTGWVQNQGILPGMVWQDRDVYLQGPIWAKIPHTDGNFHPSPLMGGFGMKHPPPQILIKNTPVPADPPTAFNKDKLNSFITQYSTGQVSVEIEWELQKENSKRWNPEIQYTSNYYKSNNVEFAVNTEGVYSEPRPIGTRYLTRNL

SEQ ID NO: 146 - protein, 745 aa, Artificial Sequence
  /note="Description of Artificial Sequence: Synthetic" polypeptide
MAADGYLPDWLEDNLSEGIREWWALKPGAPKPKANQQKQDDGRGLVLPGYKYLGPFNGLDKGEPVNAADAAALEHDKAYDQQLQAGDNPYLRYNHADAEFQERLQEDTSFGGNLGRAVFQAKKRVLEPLGLVEEGAKTAPGKKRPVEPSPQRSPDSSTGIGKKGQQPARKRLNFGQTGDSESVPDPQPLGEPPAAPSGVGPNTMAAGGGAPMADNNEGADGVGSSSGNWHCDSTWLGDRVITTSTRTWALPTYNNHLYKQISNGTSGGATNDNTYFGYSTPWGYFDFNRFHCHFSPRDWQRLINNNWGFRPKRLSFKLFNIQVKEVTQNEGTKTIANNLTSTIQVFTDSEYQLPYVLGSAHQGCLPPFPADVFMIPQYGYLTLNNGSQAVGRSSFYCLEYFPSQMLRTGNNFQFTYTFEDVPFHSSYAHSQSLDRLMNPLIDQYLYYLSRTQTTGGTANTQTLGFSQGGPNTMANQAKNWLPGPCYRQQRVSTTTGQNNNSNFAWTAGTKYHLNGRNSLANPGIAMATHKDDEERFFPSNGILIFGKQNAARDNADYSDVMLTSEEEIKTTNPVATEEYGIVADNLQQQNLGETTRPTAPQIGTVNSQGALPGMVWQNRDVYLQGPIWAKIPHTDGNFHPSPLMGGFGLKHPPPQILIKNTPVPADPPTTFNQSKLNSFITQYSTGQVSVEIEWELQKENSKRWNPEIQYTSNYYKSTSVDFAVNTEGVYSEPRPIGTRYLTRNL

SEQ ID NO: 147 - protein, 745 aa, Artificial Sequence
  /note="Description of Artificial Sequence: Synthetic" polypeptide
MAADGYLPDWLEDNLSEGIREWWALKPGAPKPKANQQKQDDGRGLVLPGYKYLGPFNGLDKGEPVNAADAAALEHDKAYDQQLQAGDNPYLRYNHADAEFQERLQEDTSFGGNLGRAVFQAKKRVLEPLGLVEEGAKTAPGKKRPVEPSPQRSPDSSTGIGKKGQQPARKRLNFGQTGDSESVPDPQPLGEPPAAPSGVGPNTMAAGGGAPMADNNEGADGVGSSSGNWHCDSTWLGDRVITTSTRTWALPTYNNHLYKQISNGTSGGALGETTRPTNDNTYFGYSTPWGYFDFNRFHCHFSPRDWQRLINNNWGFRPKRLSFKLFNIQVKEVTQNEGTKTIANNLTSTIQVFTDSEYQLPYVLGSAHQGCLPPFPADVFMIPQYGYLTLNNGSQAVGRSSFYCLEYFPSQMLRTGNNFQFTYTFEDVPFHSSYAHSQSLDRLMNPLIDQYLYYLSRTQTTGGTANTQTLGFSQGGPNTMANQAKNWLPGPCYRQQRVSTTTGQNNNSNFAWTAGTKYHLNGRNSLANPGIAMATHKDDEERFFPSNGILIFGKQNAARDNADYSDVMLTSEEEIKTTNPVATEEYGIVADNLQQQNTAPQIGTVNSQGALPGMVWQNRDVYLQGPIWAKIPHTDGNFHPSPLMGGFGLKHPPPQILIKNTPVPADPPTTFNQSKLNSFITQYSTGQVSVEIEWELQKENSKRWNPEIQYTSNYYKSTSVDFAVNTEGVYSEPRPIGTRYLTRNL

SEQ ID NO: 148 - protein, 745 aa, Artificial Sequence
  /note="Description of Artificial Sequence: Synthetic" polypeptide
MAADGYLPDWLEDNLSEGIREWWALKPGAPKPKANQQKQDDGRGLVLPGYKYLGPFNGLDKGEPVNAADAAALEHDKAYDQQLQAGDNPYLRYNHADAEFQERLQEDTSFGGNLGRAVFQAKKRVLEPLGLVEEGAKTAPGKKRPVEPSPQRSPDSSTGIGKKGQQPARKRLNFGQTGDSESVPDPQPLGEPPAAPSGVGPNTMAAGGGAPMADNNEGADGVGSSSGNWHCDSTWLGDRVITTSTRTWALPTYNNHLYKQISNGTSGGATNDNTYFGYSTPWGYFDFNRFHCHFSPRDWQRLINNNWGFRPKRLSFKLFNIQVKEVTQNEGTKTIANNLTSTIQVFTDSEYQLPYVLGSAHQGCLPPFPADVFMIPQYGYLTLNNGSQAVGRSSFYCLEYFPSQMLRTGNNFQFTYTFEDVPFHSSYAHSQSLDRLMNPLIDQYLYYLSRTQTLGETTRPTGGTANTQTLGFSQGGPNTMANQAKNWLPGPCYRQQRVSTTTGQNNNSNFAWTAGTKYHLNGRNSLANPGIAMATHKDDEERFFPSNGILIFGKQNAARDNADYSDVMLTSEEEIKTTNPVATEEYGIVADNLQQQNTAPQIGTVNSQGALPGMVWQNRDVYLQGPIWAKIPHTDGNFHPSPLMGGFGLKHPPPQILIKNTPVPADPPTTFNQSKLNSFITQYSTGQVSVEIEWELQKENSKRWNPEIQYTSNYYKSTSVDFAVNTEGVYSEPRPIGTRYLTRNL

SEQ ID NO: 149 - protein, 747 aa, Artificial Sequence
  /note="Description of Artificial Sequence: Synthetic" polypeptide
MAADGYLPDWLEDNLSEGIREWWALKPGAPKPKANQQKQDDGRGLVLPGYKYLGPFNGLDKGEPVNAADAAALEHDKAYDQQLQAGDNPYLRYNHADAEFQERLQEDTSFGGNLGRAVFQAKKRVLEPLGLVEEGAKTAPGKKRPVEPSPQRSPDSSTGIGKKGQQPARKRLNFGQTGDSESVPDPQPLGEPPAAPSGVGPNTMAAGGGAPMADNNEGADGVGSSSGNWHCDSTWLGDRVITTSTRTWALPTYNNHLYKQISNGTSGGATNDNTYFGYSTPWGYFDFNRFHCHFSPRDWQRLINNNWGFRPKRLSFKLFNIQVKEVTQNEGTKTIANNLTSTIQVFTDSEYQLPYVLGSAHQGCLPPFPADVFMIPQYGYLTLNNGSQAVGRSSFYCLEYFPSQMLRTGNNFQFTYTFEDVPFHSSYAHSQSLDRLMNPLIDQYLYYLSRTQTTGGTANTQTLGFSQGGPNTMANQAKNWLPGPCYRQQRVSTTTGQNNNSNFAWTAGTKYHLNGRNSLANPGIAMATHKDDEERFFPSNGILIFGKQNAARDNADYSDVMLTSEEEIKTTNPVATEEYGIVADNLQQQNLALGETTRPTAPQIGTVNSQGALPGMVWQNRDVYLQGPIWAKIPHTDGNFHPSPLMGGFGLKHPPPQILIKNTPVPADPPTTFNQSKLNSFITQYSTGQVSVEIEWELQKENSKRWNPEIQYTSNYYKSTSVDFAVNTEGVYSEPRPIGTRYLTRNL

SEQ ID NO: 150 - protein, 747 aa, Artificial Sequence
  /note="Description of Artificial Sequence: Synthetic" polypeptide
MAADGYLPDWLEDNLSEGIREWWALKPGAPKPKANQQKQDDGRGLVLPGYKYLGPFNGLDKGEPVNAADAAALEHDKAYDQQLQAGDNPYLRYNHADAEFQERLQEDTSFGGNLGRAVFQAKKRVLEPLGLVEEGAKTAPGKKRPVEPSPQRSPDSSTGIGKKGQQPARKRLNFGQTGDSESVPDPQPLGEPPAAPSGVGPNTMAAGGGAPMADNNEGADGVGSSSGNWHCDSTWLGDRVITTSTRTWALPTYNNHLYKQISNGTSGGALALGETTRPTNDNTYFGYSTPWGYFDFNRFHCHFSPRDWQRLINNNWGFRPKRLSFKLFNIQVKEVTQNEGTKTIANNLTSTIQVFTDSEYQLPYVLGSAHQGCLPPFPADVFMIPQYGYLTLNNGSQAVGRSSFYCLEYFPSQMLRTGNNFQFTYTFEDVPFHSSYAHSQSLDRLMNPLIDQYLYYLSRTQTTGGTANTQTLGFSQGGPNTMANQAKNWLPGPCYRQQRVSTTTGQNNNSNFAWTAGTKYHLNGRNSLANPGIAMATHKDDEERFFPSNGILIFGKQNAARDNADYSDVMLTSEEEIKTTNPVATEEYGIVADNLQQQNTAPQIGTVNSQGALPGMVWQNRDVYLQGPIWAKIPHTDGNFHPSPLMGGFGLKHPPPQILIKNTPVPADPPTTFNQSKLNSFITQYSTGQVSVEIEWELQKENSKRWNPEIQYTSNYYKSTSVDFAVNTEGVYSEPRPIGTRYLTRNL

SEQ ID NO: 151 - protein, 747 aa, Artificial Sequence
  /note="Description of Artificial Sequence: Synthetic" polypeptide
MAADGYLPDWLEDNLSEGIREWWALKPGAPKPKANQQKQDDGRGLVLPGYKYLGPFNGLDKGEPVNAADAAALEHDKAYDQQLQAGDNPYLRYNHADAEFQERLQEDTSFGGNLGRAVFQAKKRVLEPLGLVEEGAKTAPGKKRPVEPSPQRSPDSSTGIGKKGQQPARKRLNFGQTGDSESVPDPQPLGEPPAAPSGVGPNTMAAGGGAPMADNNEGADGVGSSSGNWHCDSTWLGDRVITTSTRTWALPTYNNHLYKQISNGTSGGATNDNTYFGYSTPWGYFDFNRFHCHFSPRDWQRLINNNWGFRPKRLSFKLFNIQVKEVTQNEGTKTIANNLTSTIQVFTDSEYQLPYVLGSAHQGCLPPFPADVFMIPQYGYLTLNNGSQAVGRSSFYCLEYFPSQMLRTGNNFQFTYTFEDVPFHSSYAHSQSLDRLMNPLIDQYLYYLSRTQTLALGETTRPTGGTANTQTLGFSQGGPNTMANQAKNWLPGPCYRQQRVSTTTGQNNNSNFAWTAGTKYHLNGRNSLANPGIAMATHKDDEERFFPSNGILIFGKQNAARDNADYSDVMLTSEEEIKTTNPVATEEYGIVADNLQQQNTAPQIGTVNSQGALPGMVWQNRDVYLQGPIWAKIPHTDGNFHPSPLMGGFGLKHPPPQILIKNTPVPADPPTTFNQSKLNSFITQYSTGQVSVEIEWELQKENSKRWNPEIQYTSNYYKSTSVDFAVNTEGVYSEPRPIGTRYLTRNL

SEQ ID NO: 152 - protein, 743 aa, Artificial Sequence
  /note="Description of Artificial Sequence: Synthetic" polypeptide
MAADGYLPDWLEDNLSEGIREWWALKPGAPQPKANQQHQDNARGLVLPGYKYLGPGNGLDKGEPVNAADAAALEHDKAYDQQLKAGDNPYLKYNHADAEFQERLKEDTSFGGNLGRAVFQAKKRLLEPLGLVEEAAKTAPGKKRPVEQSPQEPDSSAGIGKSGAQPAKKRLNFGQTGDTESVPDPQPIGEPPAAPSGVGSLTMASGGGAPVADNNEGADGVGSSSGNWHCDSQWLGDRVITTSTRTWALPTYNNHLYKQISNSTSGGSSNDNAYFGYSTPWGYFDFNRFHCHFSPRDWQRLINNNWGFRPKRLNFKLFNIQVKEVTDNNGVKTIANNLTSTVQVFTDSDYQLPYVLGSAHEGCLPPFPADVFMIPQYGYLTLNDGSQAVGRSSFYCLEYFPSQMLRTGNNFQFSYEFENVPFHSSYAHSQSLDRLMNPLIDQYLYYLSKTINGSTLAVPFKGQNQQTLKFSVAGPSNMAVQGRNYIPGPSYRQQRVSTTVTQNNNSEFAWPGASSWALNGRNSLMNPGPAMASHKEGEDRFFPLSGSLIFGKQGTGRDNVDADKVMITNEEEIKTTNPVATESYGQVATNHQSAQAQAQTGWVQNQGILPGMVWQDRDVYLQGPIWAKIPHTDGNFHPSPLMGGFGMKHPPPQILIKNTPVPADPPTAFNKDKLNSFITQYSTGQVSVEIEWELQKENSKRWNPEIQYTSNYYKSNNVEFAVNTEGVYSEPRPIGTRYLTRNL

SEQ ID NO: 153 - protein, 747 aa, Adeno-associated virus
MAADGYLPDWLEDNLSEGIREWWALKPGAPQPKANQQHQDNARGLVLPGYKYLGPGNGLDKGEPVNAADAAALEHDKAYDQQLKAGDNPYLKYNHADAEFQERLKEDTSFGGNLGRAVFQAKKRLLEPLGLVEEAAKTAPGKKRPVEQSPQEPDSSAGIGKSGAQPAKKRLNFGQTGDTESVPDPQPIGEPPAAPSGVGSLTMASGGGAPVADNNEGADGVGSSSGNWHCDSQWLGDRVITTSTRTWALPTYNNHLYKQISNSTSGGSSNDNAYFGYSTPWGYFDFNRFHCHFSPRDWQRLINNNWGFRPKRLNFKLFNIQVKEVTDNNGVKTIANNLTSTVQVFTDSDYQLPYVLGSAHEGCLPPFPADVFMIPQYGYLTLNDGSQAVGRSSFYCLEYFPSQMLRTGNNFQFSYEFENVPFHSSYAHSQSLDRLMNPLIDQYLYYLSKTINGSGQNQQTLKFSVAGPSNMAVQGRNYIPGPSYRQQRVSTTVTQNNNSEFAWPGASSWALNGRNSLMNPGPAMASHKEGEDRFFPLSGSLIFGKQGTGRDNVDADKVMITNEEEIKTTNPVATESYGQVATNHQSAQQEQLERALNSSAQAQTGWVQNQGILPGMVWQDRDVYLQGPIWAKIPHTDGNFHPSPLMGGFGMKHPPPQILIKNTPVPADPPTAFNKDKLNSFITQYSTGQVSVEIEWELQKENSKRWNPEIQYTSNYYKSNNVEFAVNTEGVYSEPRPIGTRYLTRNL

SEQ ID NO: 154 - protein, 738 aa, Adeno-associated virus rh.74 version 2
MAADGYLPDWLEDNLSEGIREWWDLKPGAPKPKANQQKQDNGRGLVLPGYKYLGPFNGLDKGEPVNAADAAALEHDKAYDQQLQAGDNPYLRYNHADAEFQERLQEDTSFGGNLGRAVFQAKKRVLEPLGLVESPVKTAPGKKRPVEPSPQRSPDSSTGIGKKGQQPAKKRLNFGQTGDSESVPDPQPIGEPPAGPSGLGSGTMAAGGGAPMADNNEGADGVGSSSGNWHCDSTWLGDRVITTSTRTWALPTYNNHLYKQISNGTSGGSTNDNTYFGYSTPWGYFDFNRFHCHFSPRDWQRLINNNWGFRPKRLNFKLFNIQVKEVTQNEGTKTIANNLTSTIQVFTDSEYQLPYVLGSAHQGCLPPFPADVFMIPQYGYLTLNNGSQAVGRSSFYCLEYFPSQMLRTGNNFEFSYNFEDVPFHSSYAHSQSLDRLMNPLIDQYLYYLSRTQSTGGTAGTQQLLFSQAGPNNMSAQAKNWLPGPCYRQQRVSTTLSQNNNSNFAWTGATKYHLNGRDSLVNPGVAMATHKDDEERFFPSSGVLMFGKQGAGKDNVDYSSVMLTSEEEIKTTNPVATEQYGVVADNLQQQNAAPIVGAVNSQGALPGMVWQNRDVYLQGPIWAKIPHTDGNFHPSPLMGGFGLKHPPPQILIKNTPVPADPPTTFNQAKLASFITQYSTGQVSVEIEWELQKENSKRWNPEIQYTSNYYKSTNVDFAVNTEGTYSEPRPIGTRYLTRNL

We claim:

1. A recombinant adeno-associated virus (rAAV) capsid protein comprising a peptide insertion of at least 4 and up to 12 contiguous amino acids from a heterologous protein that is not an AAV protein, said peptide insertion being immediately after an amino acid residue corresponding to amino acid 138; or one of amino acids 451 to 461 of AAV9 capsid protein of FIG. 8, wherein said peptide insertion is surface exposed when said capsid protein is packaged as an AAV particle.

2. A recombinant adeno-associated virus (rAAV) capsid protein, said capsid protein comprising a peptide insertion of at least 4 and up to 12 contiguous amino acids from a heterologous protein or domain selected from the group consisting of
(i) a neural tissue-homing protein or domain, with the proviso that the peptide insertion does not comprise sequence TLAVPFK (SEQ ID NO: 27);
(ii) an axonemal or cytoplasmic dynein-homing domain;
(iii) a bone-homing domain;
(iv) a kidney-homing domain;
(v) a muscle-homing domain;
(vi) an endothelial cell-homing domain;
(vii) an integrin receptor-binding domain;
(viii) a transferrin receptor-binding domain, with the proviso that the peptide insertion does not comprise sequence RTIGPSV (SEQ ID NO: 19) nor CRTIGPSVC (SEQ ID NO: 20);
(ix) a tumor cell-targeting domain; or
(x) a retinal cell-homing protein or domain, with the proviso that the peptide insertion does not comprise sequence LGETTRP (SEQ ID NO: 15) nor LALGETTRP (SEQ ID NO: 16);
wherein said peptide insertion is surface exposed when said capsid protein is packaged as an AAV particle.

3. The rAAV capsid protein of claim 1 or 2, wherein said capsid protein is from at least one AAV type selected from AAV type 1 (AAV1), serotype 2 (AAV2), serotype 3 (AAV3), serotype 4 (AAV4), serotype 5 (AAV5), serotype 6 (AAV6), serotype 7 (AAV7), serotype 8 (AAV8), serotype rh8 (AAVrh8), serotype 9 (AAV9), serotype 9e (AAV9e), serotype rh10 (AAVrh10), serotype rh20 (AAVrh20), serotype hu.37 (AVVhu.37), serotype rh39 (AAVrh39), and serotype rh74 (AAVrh74).

4. The rAAV capsid protein of any of claims 1-3, wherein said peptide insertion occurs immediately after one of the amino acid residues within:
(a) 450-459 of AAV1 capsid amino acid sequence (SEQ ID NO. 110);
(b) 449-458 of AAV2 capsid amino acid sequence (SEQ ID NO. 111);
(c) 449-459 of AAV3 capsid amino acid sequence (SEQ ID NO. 112);
(d) 443-453 of AAV4 capsid amino acid sequence (SEQ ID NO. 113);
(e) 442-445 of AAV5 capsid amino acid sequence (SEQ ID NO. 114);
(f) 450-459 of AAV6 capsid amino acid sequence (SEQ ID NO. 115);
(g) 451-461 of AAV7 capsid amino acid sequence (SEQ ID NO. 116);
(h) 451-461 of AAV8 capsid amino acid sequence (SEQ ID NO. 117);
(i) 451-461 of AAV9 capsid amino acid sequence (SEQ ID NO. 118);
(j) 452-461 of AAV9e capsid amino acid sequence (SEQ ID NO. 119);
(k) 452-461 of AAVrh10 capsid amino acid sequence (SEQ ID NO. 120);
(l) 452-461 of AAVrh20 capsid amino acid sequence (SEQ ID NO. 121);
(m) 452-461 of AAVhu.37 capsid amino acid sequence (SEQ ID NO. 122);
(n) 452-461 of AAVrh74 capsid amino acid sequence (SEQ ID NO. 123 or SEQ ID NO: 154); or
(o) 452-461 of AAVrh39 capsid amino acid sequence (SEQ ID NO. 124); in the sequences depicted in FIG. 8.

5. The rAAV capsid protein of claim 4, wherein said peptide insertion occurs after an amino acid residue corresponding to one of amino acids I451, N452, G453, S454, G455, Q456, N457, Q458, Q459, T460, or L461 of the AAV9 capsid.

6. The rAAV capsid protein of any of claims 1, 3-5, wherein said heterologous protein is a homing domain, a neutralizing antibody epitope, or a purification tag.

7. The rAAV capsid protein of claim 6, wherein said homing domain is
(i) a neural tissue-homing domain;
(ii) an axonemal or cytoplasmic dynein-homing domain;
(iii) a bone-homing domain;
(iv) a kidney-homing domain;
(v) a muscle-homing domain;
(vi) an endothelial cell-homing domain;
(vii) an integrin receptor-binding domain;
(viii) a transferrin receptor-binding domain;
(ix) a tumor cell-targeting domain; or
(x) a retinal cell-homing domain.

8. The rAAV capsid protein of claim 7, wherein the peptide insertion comprises or consists of at least 4 contiguous amino acids or is 7 contiguous amino acids of a dynein peptide of amino acid sequence SITLVKSTQTV (SEQ ID NO: 21), TILSRSTQTG (SEQ ID NO: 22), VVMVGEKPITITQHSVETEG (SEQ ID NO: 25), RSSEEDKSTQTT (SEQ ID NO: 26), KMQVPFQ (SEQ ID NO: 1), LKLPPIV (SEQ ID NO: 5), PFIKPFE (SEQ ID NO: 6), TLSLPWK (SEQ ID NO: 7), QQAAPSF (SEQ ID NO: 3), RYNAPFK (SEQ ID NO: 4), TLAVPFK (SEQ ID NO: 27), or TLAAPFK (SEQ ID NO: 2).

9. The rAAV capsid protein of claim 7, wherein the peptide insertion from said transferrin receptor-binding domain is at least 4 contiguous amino acids or is 7 amino acids of the amino acid sequence RTIGPSV (SEQ ID NO: 19) or CRTIGPSVC (SEQ ID NO: 20).

10. The rAAV capsid protein of claim 7, wherein the peptide insertion from said retinal cell-homing domain is at least 4 contiguous amino acids or is 7 amino acids of the amino acid sequence TLAAPFK (SEQ ID NO: 2), LGETTRP (SEQ ID NO: 15) or LALGETTRP (SEQ ID NO: 16).

11. The rAAV capsid protein of claim 10, wherein the AAV capsid protein is an AAV8 capsid protein or an AAV9 capsid protein.

12. The rAAV capsid protein of claim 7, wherein the peptide insertion from said purification tag is at least 4 contiguous amino acids or is 7 contiguous amino acids of a hemagglutinin (HA) epitope of amino acid sequence YPYDVPDYA (SEQ ID NO: 86) or of a FLAG tag of amino acid sequence DYKDDDDK (SEQ ID NO: 52).

13. The rAAV capsid protein of claim 2 or 3, wherein said neural tissue-homing protein or said retinal cell-homing protein is a human axonemal dynein (HAD) heavy chain tail.

14. The rAAV capsid protein of claim 13, wherein said peptide insertion comprises at least 4 and up to 15 contiguous amino acids from a dimerization domain of said HAD heavy chain tail.

15. The rAAV capsid protein of claim 14, wherein said peptide insertion comprises at least 4 and up to 15 contiguous amino acids from the group consisting of (depicted in FIG. 7):
(a) (aa 1-1542 of DYH1_HUMAN UniProtKB-Q9P2D7) (SEQ ID NO. 97);
(b) (aa 1-1764 of DYH2_HUMAN UniProtKB-Q9P225) (SEQ ID NO. 98);
(c) (aa 1-1390 of DYH3_HUMAN UniProtKB-Q8TD57) (SEQ ID NO. 99);
(d) (aa 1-1941 of DYH5_HUMAN UniProtKB-Q8TE73) (SEQ ID NO. 100);
(e) (aa 1-1433 of DYH6_HUMAN UniProtKB-Q9COG6) (SEQ ID NO. 101);
(f) (aa 1-1289 of DYH7_HUMAN UniProtKB-Q8WXX0) (SEQ ID NO. 102);
(g) (aa 1-1807 of DYH8_HUMAN UniProtKB-Q96JB1) (SEQ ID NO. 103);
(h) (aa 1-1831 of DYH9_HUMAN UniProtKB-Q9NYC9) (SEQ ID NO. 104);
(i) (aa 1-1793 of DYH10_HUMAN UniProtKB-Q8IVF4) (SEQ ID NO. 105);
(j) (aa 1-1854 of DYH11_HUMAN UniProtKB-Q96DT5) (SEQ ID NO. 106);
(k) (aa 1-1214 of DYH12_HUMAN UniProtKB-Q6ZR08) (SEQ ID NO. 107);
(1) (aa 1-200 of DYH14_HUMAN UniProtKB-QOVDD8) (SEQ ID NO. 108); or
(m) (aa 1-1794 of DYH17_HUMAN UniProtKB-Q9UFH2) (SEQ ID NO. 109).

16. The rAAV capsid protein of claim 15, wherein said peptide insertion comprises at least 4 and up to 15 contiguous amino acids from residues 1-200 of any one of the dynein heavy chain sequences (FIG. 7).

17. The rAAV capsid protein of claim 15, wherein said peptide insertion comprises 7 contiguous amino acids from any one of the dynein heavy chain sequences of FIG. 7.

18. The rAAV capsid protein of claim 16, wherein said peptide insertion comprises 7 contiguous amino acids from residues 1-200 of any one of the dynein heavy chain sequences (FIG. 7).

19. The rAAV capsid protein of claim 2 or 3, wherein said peptide insertion comprises at least 4 contiguous amino acids of one of the peptides:
(a)
(SEQ ID NO: 1)
KMQVPFQ;
(b)
(SEQ ID NO: 2)
TLAAPFK;
(c)
(SEQ ID NO: 3)
QQAAPSF;
(d)
(SEQ ID NO: 4)
RYNAPFK;
(e)
(SEQ ID NO: 5)
LKLPPIV;
(f)
(SEQ ID NO: 6)
PFIKPFE;
or
(g)
(SEQ ID NO: 7)
TLSLPWK.

20. The rAAV capsid protein of claim 2 or 3, wherein said peptide insertion consists of one of the peptides:
(a)
(SEQ ID NO: 1)
KMQVPFQ;
(b)
(SEQ ID NO: 2)
TLAAPFK;
(c)
(SEQ ID NO: 3)
QQAAPSF;
(d)
(SEQ ID NO: 4)
RYNAPFK;
(e)
(SEQ ID NO: 5)
LKLPPIV;
(f)
(SEQ ID NO: 6)
PFIKPFE;
or
(g)
(SEQ ID NO: 7)
TLSLPWK.

21. The rAAV capsid protein of claim 20, wherein said peptide insertion is the amino acid sequence TLAAPFK (SEQ ID NO: 2).

22. The rAAV capsid protein of claim 2 or 3, wherein said neural tissue-homing protein is a mouse axonemal dynein (MAD) heavy chain tail.

23. The rAAV capsid protein of claim 2 or 3, wherein said neural tissue-homing domain is an EPO (erythropoietin) domain that binds innate repair receptor and is not erythropoietic, or a conformational analog of said domain.

24. The rAAV capsid protein of claim 23, wherein the peptide insertion is at least 4 and up to 11 contiguous amino acids from QEQLERALNSS (SEQ ID NO: 8).

25. The rAAV capsid protein of claim 24, wherein said peptide insertion has the amino acid sequence QEQLERALNSS (SEQ ID NO: 8).

26. The rAAV capsid protein of claim 2 or 3, wherein said neural tissue-homing protein is a brain-homing domain having an SRL (serine-arginine-lysine) motif

27. The rAAV capsid protein of claim 26, wherein the peptide insertion from said brain-homing domain has at least 4 contiguous amino acids of or is the amino acid sequence LSSRLDA (SEQ ID NO: 10) or CLSSRLDAC (SEQ ID NO: 11).

28. The rAAV capsid protein of claim 2 or 3, wherein said axonemal or cytoplasmic dynein-homing domain is a dynein light chain-homing domain.

29. The rAAV capsid protein of claim 28, wherein the peptide insertion from said dynein light chain-homing domain is at least 4 and up to 12 contiguous amino acids of one of SITLVKSTQTV (SEQ ID NO: 21), TILSRSTQTG (SEQ ID NO: 22), VVMVGEKPITITQHSVETEG (SEQ ID NO: 25), or RSSEEDKSTQTT (SEQ ID NO:
26).

30. The rAAV capsid protein of claim 2 or 3, wherein said bone-homing protein is a hydroxyapatite (HA)-binding domain.

31. The rAAV capsid protein of claim 30, wherein the peptide insertion from said hydroxyapatite (HA)-binding domain is at least 6 amino acid residues of the sequence DDDDDDDD (SEQ ID NO: 9).

32. The rAAV capsid protein of claim 2 or 3, wherein said kidney-homing domain comprises amino acid sequence CLPVASC (SEQ ID NO: 12).

33. The rAAV capsid protein of claim 32, wherein the peptide insertion from said kidney-homing domain peptide is the amino acid sequence LPVAS (SEQ ID NO: 13) or CLPVASC (SEQ ID NO: 12).

34. The rAAV capsid protein of claim 2 or 3, wherein the peptide insertion from said muscle-homing domain comprises or consists of the amino acid sequence ASSLNIA (SEQ ID NO: 14).

35. The rAAV capsid protein of claim 2 or 3, wherein the peptide insertion comprises or consists of amino acid sequence QAVRTSL (SEQ ID NO: 23) or QAVRTSH (SEQ ID NO: 24).

36. The rAAV capsid protein of claim 2 or 3, wherein the peptide insertion from said endothelial cell-homing domain comprises or consists of the amino acid sequence SIGYPLP (SEQ ID NO: 28).

37. The rAAV capsid protein of claim 2 or 3, wherein the peptide insertion from said integrin-binding domain has amino acid sequence CDCRGDCFC (SEQ ID NO: 29).

38. The rAAV capsid protein of claim 2 or 3, wherein said transferrin receptor-binding domain is a transferrin domain, or a conformation analog thereof, or an iron-mimic.

39. The rAAV capsid protein of claim 38, wherein the peptide insertion from said transferrin domain is at least 4 contiguous amino acids or is 7 contiguous amino acids from sequence HAIYPRH (SEQ ID NO: 17) or THRPPMWSPVWP (SEQ ID NO: 18).

40. rAAV capsid protein of claim 39, wherein the peptide insertion comprises or consists of amino acid sequence HAIYPRH (SEQ ID NO: 17) or THRPPMWSPVWP (SEQ ID NO: 18).

41. The rAAV capsid protein of claim 2 or 3, wherein the peptide insertion from said tumor cell-targeting domain comprises or consists or amino acid sequence NGRAHA (SEQ ID NO: 30).

42. The rAAV capsid protein of claim 2 or 3, wherein the peptide insertion of at least 4 contiguous amino acids or is 7 contiguous amino acids from one of TLAAPFK (SEQ ID NO: 2), TLAVPFK (SEQ ID NO: 27), RTIGPSV (SEQ ID NO: 19), CRTIGPSVC (SEQ ID NO: 20), LGETTRP (SEQ ID NO: 15), and LALGETTRP (SEQ ID NO: 16).

43. The rAAV capsid protein of any of claim 2 or 13-42, wherein said peptide insertion occurs immediately after one of the amino acid residues (as depicted in FIG. 8):
(a) 138, 262-272; 450-459; or 585-593 of AAV1 capsid amino acid sequence (SEQ ID NO. 110);
(b) 138, 262-272; 449-458; or 584-592 of AAV2 capsid amino acid sequence (SEQ ID NO. 111);
(c) 138, 262-272; 449-459; or 585-593 of AAV3 capsid amino acid sequence (SEQ ID NO. 112);
(d) 137, 256-262; 443-453; or 583-591 of AAV4 capsid amino acid sequence (SEQ ID NO. 113);
(e) 137, 252-262; 442-445; or 574-582 of AAV5 capsid amino acid sequence (SEQ ID NO. 114);
(f) 138, 262-272; 450-459; 585-593 of AAV6 capsid amino acid sequence (SEQ ID NO. 115);
(g) 138, 263-273; 451-461; 586-594 of AAV7 capsid amino acid sequence (SEQ ID NO. 116);
(h) 138, 263-274; 452-461; 587-595 of AAV8 capsid amino acid sequence (SEQ ID NO. 117);
(i) 138, 262-273; 452-461; 585-593 of AAV9 capsid amino acid sequence (SEQ ID NO. 118);
(j) 138, 262-273; 452-461; 585-593 of AAV9e capsid amino acid sequence (SEQ ID NO. 119);
(k) 138, 263-274; 452-461; 587-595 of AAVrh10 capsid amino acid sequence (SEQ ID NO. 120);
(l) 138, 263-274; 452-461; 587-595 of AAVrh20 capsid amino acid sequence (SEQ ID NO. 121);
(m)138, 263-274; 452-461; 587-595 of AAVhu37 capsid amino acid sequence (SEQ ID NO. 122);
(n) 138, 263-274; 452-461; 587-595 of AAVrh74 capsid amino acid sequence (SEQ ID NO. 123 or SEQ ID NO: 154); or
(o) 138, 263-274; 452-461; 587-595 of AAVrh39 capsid amino acid sequence (SEQ ID NO. 124).

44. The rAAV capsid protein of claim 43 comprising an amino acid sequence TLAAPFK (SEQ ID NO: 2) inserted between amino acid residues 588-589 of the AAV9 capsid or immediately after an amino acid residue corresponding to amino acid 138 of AAV9 capsid (see FIG. 8).

45. The rAAV capsid protein of claim 43 comprising an amino acid sequence TLAAPFK (SEQ ID NO: 2) inserted after one of I451 to L461, 5268 or Q588 of the AAV9 capsid (FIG. 8).

46. The rAAV capsid protein of claim 43 comprising an amino acid sequence QEQLERALNSS (SEQ ID NO: 8) between amino acid residues 588-589 of the AAV9 capsid (FIG. 8).

47. The rAAV capsid protein of claim 43 comprising an amino acid sequence QEQLERALNSS (SEQ ID NO: 8) inserted at one or more positions selected from I451 to L461, or S268 of the AAV9 capsid (FIG. 8).

48. The rAAV capsid protein of claim 43, wherein said peptide insertion comprises the amino acid sequence TLAVPFK (SEQ ID NO: 27) immediately after one of amino acid residues 262-273 of the AAV9 capsid protein.

49. The rAAV capsid protein of claim 43, wherein said peptide insertion comprises the amino acid sequence LGETTRP (SEQ ID NO: 15) between amino acid residues 269 and 270 of the AAV8 capsid protein.

50. The rAAV capsid protein of claim 49, wherein said peptide insertion has the amino acid sequence LALGETTRP (SEQ ID NO: 16).

51. The rAAV capsid protein of claim 43, wherein said peptide insertion comprises the amino acid sequence LGETTRP (SEQ ID NO: 15) between amino acid residues 590 and 591 of the AAV8 capsid protein.

52. The rAAV capsid protein of claim 51, wherein said peptide insertion has the amino acid sequence LALGETTRP (SEQ ID NO: 16).

53. The rAAV capsid protein of claim 43, wherein said peptide insertion comprises the amino acid sequence LGETTRP (SEQ ID NO: 15) immediately after one of amino acid residues 453 and 454 of the AAV8 capsid protein.

54. The rAAV capsid protein of claim 53, wherein said peptide insertion comprises the amino acid sequence LALGETTRP (SEQ ID NO: 16).

55. The rAAV capsid protein of any of claim 2 or 13-43, wherein said capsid is AAV9 and said peptide insertion occurs between amino acid residues 454 to 455 of AAV9 (FIG. 8).

56. The rAAV capsid protein of any of claim 2 or 13-43, wherein said peptide insertion occurs immediately after an acid residue corresponding to one of I451 to L461, S268 or Q588 of the AAV9 capsid (FIG. 8).

57. The rAAV capsid protein of claim 43, wherein said peptide insertion occurs immediately after one of amino acids 451 to 461 of AAV9 capsid protein.

58. The rAAV capsid protein of any of claim 2 or 13-43, wherein said peptide insertion occurs in an AAV capsid eighth variable region (VR-VIII).

59. The rAAV capsid protein of any of the preceeding claims, with the proviso that said capsid protein is not the AAV2 capsid protein.

60. A recombinant AAV capsid protein comprising one or more amino acid substitutions relative to the wild type or unengineered capsid protein, in which the rAAV capsid protein is an AAV8 capsid protein with an A269S amino acid substitution or is an AAV9 capsid protein with S263G/S269R/A273T substitutions, or W503R or Q474A substitutions, or corresponding substitutions in a capsid protein of another AAV type capsid.

61. The rAAV capsid protein of embodiment 60 further comprising 498-NNN/AAA-500 for an AAV8 capsid protein or 496-NNN/AAA-498 for an AAV9 capsid protein, or corresponding substitutions in a capsid protein of another AAV type capsid.

62. A nucleic acid comprising a nucleotide sequence encoding the rAAV capsid protein of any of the preceding claims, or encoding an amino acid sequence sharing at least 80% identity therewith.

63. The nucleic acid of claim 62 which encodes the rAAV capsid protein of any of the preceding claims.

64. A packaging cell capable of expressing the nucleic acid of claim 62 or 63 to produce AAV vectors comprising the capsid protein encoded by said nucleotide sequence.

65. A rAAV vector comprising the capsid protein of any of claims 1-61.

66. The rAAV vector of claim 65, further comprising a transgene.

67. A pharmaceutical composition comprising the rAAV vector of claim 65 or 66 and a pharmaceutically acceptable carrier.

68. A method of delivering a transgene to a cell, said method comprising contacting said cell with the rAAV vector of claim 65 or 66; or the rAAV vector of claim 65 or 66 for use in delivering a transgene to a cell, wherein said cell is contacted with the vector.

69. A method of delivering a transgene to a target tissue of a subject in need thereof, said method comprising administering to said subject the rAAV vector of claim 65 or 66, wherein said peptide insertion is a homing peptide; or the rAAV vector of claim 65 or 66 for use in delivering a transgene to a target tissue of a subject in need thereof, wherein the vector is administered to said subject.

70. The method, or rAAV vector for use, according to claim 69, wherein said rAAV vector is administered systemically, intravenously, intrathecally, intra-nasally, intra-peritoneally, intravitreally, via lumbar puncture or via the cisterna magna.

71. The method, or rAAV vector for use, according to claim 70, wherein said target tissue is:
(i) a neural tissue, and said vector comprises the peptide insertion from said neural tissue-homing domain;
(ii) bone, and said vector comprises the peptide insertion from said bone-homing domain;
(iii) kidney, and said vector comprises the peptide insertion from said kidney-homing domain;
(iv) muscle, and said vector comprises the peptide insertion from said muscle-homing domain;
(v) an endothelial cell, and said vector comprises the peptide insertion from said endothelial cell-homing domain;
(vi) an integrin receptor, and said vector comprises the peptide insertion from said integrin receptor-binding domain;
(vii) a transferrin receptor on a tumor cell, and said vector comprises the peptide insertion from said transferrin receptor-binding domain;
(viii) a tumor cell, and said vector comprises the peptide insertion from said tumor cell-targeting domain; or
(ix) a retinal cell, and said vector comprises the peptide insertion from said retinal cell-homing domain.

72. The method, or rAAV vector for use, of claim 71, wherein said target tissue is retinal cells and the peptide insertion comprises the amino acid sequence TLAAPFK (SEQ ID NO: 2), LGETTRP (SEQ ID NO: 15) or LALGETTRP (SEQ ID NO: 16).

73. The method, or rAAV vector for use, of claim 72, wherein said target tissue is retinal cells and the peptide insertion comprises the amino acid sequence TLAAPFK (SEQ ID NO: 2).
